United States Patent Application Publication US 2006/0041961 A1 - sequence listing, part 3

SEQ ID NO: 10180 - protein, 751 aa, Geobacillus stearothermophilus
MENQNRQNAAQCPFHGSVTNQSSNRTTNKDWWPNQLNLSILHQHDRKTNPHDEEFNYAEEFQKLDYWALKEDLRKLMTESQDWWPADYGHYGPLFIRMAWHSAGTYRTGDGRGGASTGTQRFAPLNSWPNNANLDKARRLLWPIKKKYGNKISWADLFILAGNVAIESMGGKTIGFGGGRVDVWHPEEDVYWGSEKEWLASERYSGDRELENPLAAVQMGLTYVNPEGPDGKPDPKAAARDIRETFRRMGMNDEETVALIAGGHTFGKAHGAGPATHVGPEPEAAPIEAQGLGWISSYGKGKGSDTITSGIEGAWTPTPTQWDTSYFDMLFGYDWWLTKSPAGAWQWMAVDPDEKDLAPDAEDPSKKVPTMMMTTDLALRFDPEYEKIARRFHQNPEEFAEAFARAWFKLTHRDMGPKTRYLGPEVPKEDFIWQDPIPEVDYELTEAEIEEIKAKILNSGLTVSELVKTAWASASTFRNSDKRGGANGARIRLAPQKDWEVNEPERLAKVLSVYEDIQRELPKKVSIADLIVLGGSAAVEKAARDAGFDVKVPFFPGRGDATQEQTDVESFAVLEPFADGFRNYQKQEYSVPPEELLVDKAQLLGLTAPEMTVLVGGLRVLGANYRDLPHGVFTDRIGVLTNDFFVNLLDMNYEWVPTDSGIYEIRDRKTGEVRWTATRVDLIFGSNSILRSYAEFYAQDDNQEKFVRDFINAWVKVMNADRFDLVKKARESVTALQYHSGSRSVITSGLQ

SEQ ID NO: 10181 - protein, 142 aa, Zea mays
MAETEYRCFVGGLAWATDDNNLQQAFSQYGEILDAKIINDRETGRSRGFGFVTFGSEESMRQAIEEMNGKELDGRNITVNEAQSRRSGGGGGGGGGYGGQRGGGGGYGGGGGYGGGGGYGGGGGYGGQRDGEGGNSGGQEEN

SEQ ID NO: 10182 - protein, 150 aa, Zea mays
  unsure (1)..(150): unsure at all Xaa locations
MQVQVQVQQRGSPAPTAELEVSLREFALSDADTRAFMSWASDPRVVRFQRCDAYEHVDXARRYITDHVLPHPWYHAICAGAGAPLPVVGSISVKAGPAEDGGPFRASVGYRLARAHWGRGMATRAVRAEAAAMFAARPWLLRLEAVADVD

SEQ ID NO: 10183 - protein, 375 aa, Brucella suis 1330
MKFKAAVLDRHGVERPYNQTKPLVIREIELREPKADEVLVKLAASGLCHSDLSVINGDRSRQIPMVLGHEAAGVVEKIGEGVTDLVPGDHVVCVFVPNCGHCQPCAEGRPALCEPGAAANGKGEMLSGGLRLFCDDGDVYHHCGVSAYAEYAVMSRYSIIRIEKDIPLHIAALMGCAVLTGTGSIFNTGLVKPGSRVAIAGLGGVGLAAVMGAVAAGATEIIALDMFDDKLALAEQLGATKTFNVQSEGVVEAVKEYTKGGVDAAFEYAGSGAALAMCYALTKRGGEVVTAGLPNPKNMLSIPAVSLVAEEKSIRGSYLGSGVPTRDIPLFLDLYRKGKLPVEKLLTHRIKLEEINEGFERLAAGKAIRQVVEFN

SEQ ID NO: 10184 - protein, 175 aa, Bacillus halodurans
MIFRYKDFSPKVDTTAFIAESATVIGNVEIGAYTTVLFNAVIRGDEGLIKIGRRCNIQENVMCHLYEQYPLVLEDEVSLGHHAIVHGCTLKQGVLIGMGATVLDGAEIGEYSIVGAGSVVPPGKVIPPRSLVLGSPGKVVREVTEQDLAMIEETVETYVRNGQEFKRSDVLERIR

SEQ ID NO: 10185 - protein, 237 aa, Hordeum vulgare subsp. vulgare
MPSRPAPFIHRLRLLRSAVVSPSSAPLPCSRPRLAVPFAQPPIRAPAFAAAGSPLLRPVGARFSLSSNMAAAASSASSVHDFTVEDASGKDVDLSTYKGKVLLIVNVASQCGLTNSNYTELAQLYEKYKDQGFEILAFPCNQFGGQEPGTNEEIVQFACTRFKAEYPIFDKVDVNGDNVAPVYKFLKSSKGSLFGDNIKWNFSKFLVDKDGNVVDRYAPTTSPLSIEKDIKKLLASS

SEQ ID NO: 10186 - protein, 396 aa, Bifidobacterium longum DJO10A
MSIASNSTVIILGSTGSIGTQGLDVISRHPERFTVTGLAAGGAHIELLAQQAAQFHVSEAAVFDETKVPALQAALAQAGAQGVRVTGGPDSVIAMAGSGANVVLNGITGSIGLEPSIAALKAGSQLALANKESVVAGGHLLFSAQVRENQINPVDSEHSAIWQSLRSGTHAEVAKLVVTASGGPFRGWKRADMENITPEQALHHPTWNMGPVVTINSSTLMNKGLEVIEASRLFNVPPERIDVTVHPQSIVHSMVEFVDGATICQASPPDMRLPIALGLSAPDRMTNVAAACDWTQAATWTFEPLDDEAFPAVQLARHCLAASEKHTAVLNAANEQAVHAFLEHRLPYLGIVDTVKAVLDQMDAELRGNPLFTDVEEMNQLELEARRRADDLINKQ

SEQ ID NO: 10187 - protein, 437 aa, Zea mays
MSFRSIVRDVRDGFGSLSRRGFEVKFLGHRRGRSHGAVHELRDPAPVIQSSCWANLPPELLRDVIERLEASEATWPNRKSVVSCAAVCRTWREICKEIVKNPEFSGKITFPVSLKQPGPRDVTIQCFIKRDKSTQTYYLYLCLSTAVLVESGKFLLCAKRTSRPTCTEYTIFMNSENLSRSSKMYIGKLRSNLLGTKFAIYDTQPPCNAAEPGKTSRRFYSRKVSPKVSSSTYNIAQVSHELNVLGTRGPRRMNCVMHSIPTSCLEAGGSVPSQLDSILARSTDESFGSISFSKSSVVDRSMRFSSSRFSDISMSSSRRIGDTASGDNDECKERPLILRNKAPRWHEQLQCWCLNFRGRVTVASVKNFQLVAATQPAAGAPTPSQATPVPPPEHEKVILQFGKVAKDMFTMDYRYPLSAFQAFAICLSSFDTKLACE

SEQ ID NO: 10188 - protein, 151 aa, Sulfolobus tokodaii
MPEFALQRRLAAELTNVGENNVKFNTNYLDDIASAITRDEIRKLIKEGKIIIEKKKGISSGRLKEKKEKRRKRGEKRKSGSRKGPAGARRGKKEQWVLKIRKIRTYLKWLRDNDVIDKKTYRLAYRKAKGNSFRNLSDVKNYLKQLGVKVE

SEQ ID NO: 10189 - protein, 263 aa, Brassica napus; identical to SEQ ID NO: 2466

SEQ ID NO: 10190 - protein, 751 aa, Geobacillus stearothermophilus
MENQNRQNAAQCPFHGSVTNQSSNRTTNKDWWPNQLNLSILHQHDRKTNPHDEEFNYAEEFQKLDYWALKEDLRKLMTESQDWWPADYGHYGPLFIRMAWHSAGTYRIGDGRGGASTGTQRFAPLNSWPDNANLDKARRLLWPIKKKYGNKISWADLFILAGNVAIESMGGKTIGFGGGRVDVWHPEEDVYWGSEKEWLASERYSGDRELENPLAAVQMGLIYVNPEGPDGKPDPKAAARDIRETFRRMGMNDEETVALIAGGHTFGKAHGAGPATHVGPEPEAAPIEAQGLGWISSYGKGKGSDTITSGIEGAWTPTPTQWDTSYFDMLFGYDWWLTKSPAGAWQWMAVDPDEKDLAPDAEDPSKKVPTMMMTTDLALRFDPEYEKIARRFHQNPEEFAEAFARAWFKLTHRDMGPKTRYLGPEVPKEDFIWQDPIPEVDYELTEAEIEEIKAKILNSGLTVSELVKTAWASASTFRNSDKRGGANGARIRLAPQKDWEVNEPERLAKVLSVYEDIQRELPKKVSIADLIVLGGSAAVEKAARDAGFDVKVPFFPGRGDATQEQTDVESFAVLEPFADGFRNYQKQEYSVPPEELLVDKAQLLGLTAPEMTVLVGGLRVLGANYRDLPHGVFTDRIGVLTNDFFVNLLDMNYEWVPTDSGIYEIRDRKTGEVRWTATRVDLIFGSNSILRSYAEFYAQDDNQEKFVRDFINAWVKVMNADRFDLVKKARESVTALQVYPYTRSKGVGVLQ

SEQ ID NO: 10191 - protein, 184 aa, Triticum aestivum
MATPTTPLLKDELDIVIPTIRNLDFLEMWRPFFQPYHLIIVQDGDPSKVIKVPEGFDYELYNRNDVNRILGPKASCISFKDSACRCFGYMVSKKKYIYTIDDDCFVAKDPSGKDINALEQHIKNLLSPSTPFFFNTLYDPYREGADFVRGYPFSLREGAPTAVSHGLWLNIPDYDAPTQLVKPR

SEQ ID NO: 10192 - protein, 497 aa, Thermoplasma acidophilum
MMASVTGMIGSGWLFSAFYASSMAGPYSIFSWLVGTGIVAILALIYADLSGRVPMAGAAAGYPFLTNGTVAGSLNAWSLFLGYASTPPLEVIASISYLSFLVPGLLNNNGLLTTTGILLAVALLVAFFILNATGIRNTSRFNNIISYMKIAIPIITSFFFIFTIFSIRNFTLVGTVKPEGIFTAVPGAGIAFSFLGFRQAVELSGEAKNPQKTVPIAIMLSVAVASAIYMIVQIAFIGSLQWGSIKPGDWAALADSGYSSGPMLVLASTLGLGALATVLLFDGIISPLGTSSIYQTTTSRISYRISEMGFFPKKISTTNSRSVPIFALILDLVVMILFVLPFPSWQSLVSVNSDLTIIAYMSGPISLAIFEKYGIEAKGFRLPASKILAPLGFALSALIVYWSGYPTTLYMSAIAIAGLVLFVFARKNPIRDISQGSYMIAILAILPVVSYLGSYGIGIIPFPLDLIVISAVALAIFYAGTRAAPQSVALMENFISS

SEQ ID NO: 10193 - protein, 876 aa, Neurospora crassa
MATTLSSGAAAELPIRSQSVRTRRPPTTSRPEPPLPRSESTNRAEASRPHRRSSQRSASGATTAATTTTTTSTATSSRHHPHPSQQQQQYHHQQQPDMSAAAAAAAAPHGHASAGDDHRNGADAGVSTHRSATGTTKQRYRTVIPAPSGNYAFIKTIGQGSMGKVKLAKKEGTNELASQPIKCDISLIIERVSPDDGRQSREEREKADAAREDRNAREAAIVSLLNHQYICGLRDNLRTRWHWYMLFEYVNGGQMLDYIISHGKLKEKQARKFARQIASAVDYCHRNSIVHRDLKIENILISKTGDIKIIDFGLSNLFSPEEDRKLKTYCGSLYFAAPELLQARPYTGPEVDVWSFGVVLFVLVCGKVPFDDQYMPALHQKIKKGAVDYPNWLSSECKHLISRMLVTDPKQRATMQEVMNHPWMLKGYNGPPDNYLPRREPLTLPLDPEVISQMTGFKFGPPEYITAELTKRIKSPKYQAAVRRLEKERERPEPIAKDAEKKRGFGFDFYKRRNSVTSKDTLTAASSEGLSLGDDPLNAFDPLISIYYLVREKLERERNHVYIDLQQPSKAQQPPPSSSQTVMPVPPSPVIRPKEKHSLADIVPPQPVHNAEPRSRQRTRSHSEDQPREPIQGGLLSPDMVPAKKESTAAGILRRLSTRDRRKEPPATASSTDGKPPLRGSMSMRAKSLGHARRESIQMRRAKREAEAAAAQQAQSQTTEPQRSYQSHHHSVREETDAELVDSDIRGETSGGSNERLEPEDPDLVKPVFLKGIFSVSTTSTKPLSEIRADIKRVLRVLGVEFNEIKGGFSCRHTPSINHAERQPTVMTEGGNEIEFEILIVKVPIVSLHGVQFKRLAGNTWQYKALAEQIVRELRL

SEQ ID NO: 10194 - protein, 540 aa, Candida tropicalis
MSSSPSFAQEVLATTSPYIEYFLDNYTRWYYFIPLVLLSLNFISLLHTKYLERRFHAKPLGNVVLDPTFGIATPLILIYLKSKGTVMKFAWSFWNNKYIVKDPKYKTTGLRIVGLPLIETIDPENIKAVLATQFNDFSLGTRHDFLYSLLGDGIFTLDGAGWKHSRTMLRPQFAREQVSHVKLLEPHVQVFFKHVRKHRGQTFDIQELFFRLTVDSATEFLFGESAESLRDDSVGLTPTTKDFEGRGDFADAFNYSQTYQAYRFLLQQMYWILNGAEFRKSIAIVHKFADHYVQKALELTDDDLQKQDGYVFLYELAKQTRDPKVLRDQLLNILVAGRDTTAGLLSFVFYELSRNPEVFAKLREEVENRFGLGEEARVEEISFESLKSCEYLKAVINEALRLYPSVPHNFRVATRNTTLPRGGGKDGCSPIVVKKGQVVMYTVIGTHRDPSIYGADADVFRPERWFEPETRKLGWAYVPFNGGPRICLGQQFALTEASYVTVRLLQEFGNLSSDPNAEYPPKLQNTLTLSLFDGADVRMF

SEQ ID NO: 10195 - protein, 170 aa, Ferroplasma acidarmanus
MIKVGKGLYVADTAVIIGNVTVGDNVTIMDSAVIRADQNSIKIGDNSNIQDNATIHVDLDCETVIGKNVSVGHNAIVHGAIVDDDVLVGMGAIVLNKAHLRPGTVVAAGTVIPENFESDGNCMIAGVPGKVKRTGEQYFTMAHLNSLEYLKLNKDFREGKYEIMKGNRHE

SEQ ID NO: 10196 - protein, 393 aa, Rhodobacter sphaeroides
MISAVLPTYNRAPLAFVAGEGSWLTAEDGSRYLDLGAGIAVNALGHANPALVEVISAQAAKLWHVSNLYRIPEQERLAEKLVEATFADTVFFTNSGTEAAELSIKMVRKYWSEKGQPDRIEILCFEGAFHGRSTGAIAAAGSEKMTKGYGPLMPGFRQLPFGDHEALRAAISEKTAAVMLEPVQGEGGIRVLPDVCLKGLRDACDAVGALLVFDEVQCGMGRTGRLFAHEWAGIEPDIMMVAKGIGGGFPLGAVLAKKAAAAAMTAGTHGSTYGGNPLGCAVGAKVMEIVADPAFLAEVNRKAALFRQKLEGLVAAHPQVFEEVRGAGLMLGLKCRAPNADLVKAAYGQHLLTVPAADNVVRLLPALNIPDEDIAEAVARLDRAAGTLDADAA

SEQ ID NO: 10197 - protein, 338 aa, Agrobacterium tumefaciens str. C58 (U. Washington)
MQMRKLGESGLFVSELCFGAMTFGGTDGLWGKVGRLDQEDADALVKAALEAGINLFDTANVYAHGRSEEILGRSLKNLGVSRSDVVIATKVASAMGDGPNHRGASRGHIISECRASLGRLGLDHIDLYQIHAFDSATPIEETLEALDTLVRAGDVRYIGLSNWAAWQIMKAIGITRARALAPITSLQAYYTLVGRDLEREIGPLLSSERVGLMVWSPLAGGYLTGKYSAGGNAAGGRQTELDFPPIDRIRGEPLIAVLKAVAEKHGSSPAQIAIAWLLKQKVVSTVIIGAKRVEQLQENIRSASIELDDNDMAKLDEVSRLPVEYPGWLLNDGNGHSR

SEQ ID NO: 10198 - protein, 347 aa, Bradyrhizobium japonicum USDA 110
MDIKTAKAAILVESGKPLIVDEFTLPDTLEHGQVLAHVHTSSICGAQINEIDAVKGADKFLPHLLGHEALATIVETGPGVVSCKQGDTVVMHWRPGKGIQSNTPVYSWHGKRLNAGWVTTFNEYAVVSENRVTPVPPSIDRSSAPLLGCAVTTALGVVNNDAQVAIGEAVLVFGVGGVGLNIVQFAAMVGAHPVVAIDRLDNKLEMARQFGATHTINSDAVKDLAAEVRSITGPDGPDKVVETTGVSRLIELAYEVTAKKGRCILVGVPRDKVEIYTLPLHFEKVLKGSEGGQCQPARDIPRLVRLDEAGKVSYRGIVTHEFALDDINDALDLMRSGTSGRILLNIS

SEQ ID NO: 10199 - protein, 168 aa, Zea mays
  unsure (1)..(168): unsure at all Xaa locations
IHPWSTPAGSPSSKAPSCSRAHGQALGRRLQHPAQGRAWKKGPTRGKGGPQNXGVRQRTWXKWVAEIREPNKRTRLWLGSFATTEQAALAYDEAARRLYDPDAFLNLSHLRAFTPTLHTTATSLPSSSKSRQPPPHVLQRKSQDVRDQITRSCELVADCYRVRSRRTV

SEQ ID NO: 10200 - protein, 258 aa, Xylella fastidiosa
MTQSRWRLDGRTALITGASTGIGLAVARELLGLGADVLLVARNADLLGRVRDELAEEFPERELHGLAADVADDVDRRAILDWVEDCSNGLHVLINNAGGNVTRAALEYTEDEWREIFEINLFSAFELCRYTQPLLACHASTAIVNIGSVSGLTHVRSGVPYGMSKAALHQMTRNLAVEWAEDGIRVNAVAPWYIRTRRTSEPLSDVYYYEQVIERTPMRRIGEPEEVAAAVAFLCLPASSYVTGECIAVDGGFMRYGF

SEQ ID NO: 10201 - protein, 407 aa, Saccharomyces cerevisiae
MDSKTVLLTDSGETMGFFIPQSSLGNLKLYKYQSDDRSFLSNHVLRPFWRKFATIFPLWMAPNLVTLLGFCFIIFNVLTTLYYDPYFDQESPRWTYFSYAIGLFLYQTFDACDGMHARRTGQQGPLGELFDHCIDSINTTLSMIPVCSMTGMGYTYMTIFSQFAILCSFYLSTWEEYHTHKLYLAEFCGPVEGIIVLCISFIAVGIYGPQTIWHTKVAQFSWQDFVFDVETVHLMYAFCTGALIFNIVTAHTNVVRYYESQSTKSATPSKTAENISKAVNGLLPFFAYFSSIFTLVLIQPSFISLALILSIGFSVAFVVGRMIIAHLTMQPFPMVNFPFLIPTIQLVLYAFMVYVLDYQKGSIVSALVWMGLGLTLAIHGMFINDIIYDITTFLDIYALSIKHPKEI

SEQ ID NO: 10202 - protein, 472 aa, Artemisia annua
MSLNTLSPSEIRVNSFLDTTKSNTNLFKLQGGVSVKRKDSKVNGIQCSAAASTPPPAWPGTALVQPGTKNWSGPKPISIIGSTGSIGTQTLDIVAENPDKFKVVALAAGSNVTLLAEQIKAFKPQLVSIKNESLVAELKEALAGSDYMPEIIPGDEGVVEVARHPDCVTVVTGIVGCAGLKPTVAAIEAGKNIALANKETLIAGGPFVLPLAHKHNVKILPADSEHSAIFQCIQGFPEGALRRIILTASGGAFRDWPVEKLKDVKVADALKHPNWSMGRKITVDSATLFNKGLEVIEAHYLYGSSYDNIDIVIHPQSIIHSMVETQDSSVLAQLGWPDMRLPILYTLSWPDRVQCSEITWPRLDLCKLGSLTFKAPDNVKYPSMHLAYSAGRAGGTMTGVLSAANEKAVEMFLDEKIGYLDIFKVVELTCEKHQAELVTAPSLEEIIHYDLWAREYAASVKPSSSGLTPALV

SEQ ID NO: 10203 - protein, 276 aa, Streptomyces atroolivaceus
MSGRLTGRTAIVTGAGRGVGRACATAFAAQGADLVLVDIAADLPHVPYPAATPSQLDHTARLCREQGAAVLTARADVRDAAACERVVADAVDRFGSLDVLVNNAGIAGPSGRIVHEVTEDEWAVMIDVNLNGAWRMLKAAGASMVAARSGSIVNIASTAGLVGYRNFAGYVASKHGLVGLTKAAALDYAPYRVRVNAVCPGSVRDGEAWEGRMLVEIGRSIGIEPADHEAEFITQMPMNTLVEADDVAGAALWLASEESRHSTGGVITVDAGYSAR

SEQ ID NO: 10204 - protein, 448 aa, Methanosarcina barkeri
MEKAMKAGQYFDFFEREAGMFNTIGPRAREIIEQDCKITSACTARPYPLVVDSAKGSVIRDVDGREYIDLIAGIAVMNAGYSNPEVKAAISAQLEKMTHCGYGDFFAEPPVKLAKKLEDLSGYSKVFYCNSGTEAVEAAIKLAFWKTKRQGLISFYNSFHGRTLGSLSLTCSKARQKEHFPVLHTAHSHYAYCYRCPFKLEYPSCGIECAKELENLIFRRELSPTDTAAVFVEPVQGEGGYIVPPPEFHKEVRRICTDNDVLLVADEVQAGCFRTGPFLAMENFGVRAEISCFAKALGGGLPLGAMLADRELMDWPQGIHSNTFGGNLLASAASLASLEFLEKENIEHRVKELGSQMKQRLRELQENFPCIGDVRGLGLMVGVEIVKPDKSIDPIQRDRILRKAFKEGILLLPCGDSVIRFSPPLVITDEELDSGLEKFQKALEKAGT

SEQ ID NO: 10205 - protein, 175 aa, Zea mays subsp. mays
RLLAANPVYGKIPVLLLPDGRAICESAVIVQYIEDVARESGGAEAGSLLLPDDPYERAMHRFWTAFIDDKFWPALDAVSLAPTPGARAQAAEDTRAALSLLEEAFKDRSNGRAFFSGGDAAPGLLDLALGCFLPALRACERLHGLSLIDASATPLLDGWSQRFAAHPAAKRVCRT

SEQ ID NO: 10206 - protein, 232 aa, Triticum aestivum
  unsure (1)..(232): unsure at all Xaa locations
MKKIFGAKKSQDPPPSILYTTDRIYKRGDTVDDKIKKLDAELARYTRPGPAPEAVKARAMRILKQRKMYEGQRDMLRSQRHXYNQTYSLDQVAIASEGIKTAQQAATAEQAGKKEPDGMEETVRIEDVDSMQDEMMDLMDVSNEIQETLGRSYNVPDDIEEEELMGADEALEADTDPASHPADKETDLDSELDLPSELNLPAAPSGHAAVPANRQQEDELGLPTVPHASIRT

SEQ ID NO: 10207 - protein, 379 aa, Arabis hirsuta
  unsure (1)..(379): unsure at all Xaa locations
MSTTGQIIRCKAAVAWEAGKPLVMEEVEVAPPQKNEVRIKILFTSLCHTDVYFWEAKGQTPLFPRIFGHEAGGIVESVGEGVTDLAPGDHVLPIFTGECGDCPHCHSEESNMCDLLRINTERGVMINDGESRFSIDGNPIYHFVGTSTFSEYTVVHSGQVAKINPDAPLDKVCIVSCGLSTGLGATLNVAKPKKGQSVAIFGLGAVGLAAAEGARIAGASRIIGVDLNSKRFDEAKKFGVTEFVNPKDHDKPVQQVIAEMTDGGVDRSVECTGSVQAMIQAFECVHDGWGVAVLVGVPSKDDAFKTHPMNFLNERTXKGTFFGNYKPKTDIPGLVEKYMNKELEIEKFITHTVPFSEINKAFDYMLKGEGIRCIITMGA

SEQ ID NO: 10208 - protein, 95 aa, Glycine max
  unsure (1)..(95): unsure at all Xaa locations
MHAAQGSIYQALGLRDNARLFCMPGRKVHERKISPGIMMSSYAKAXDMSALNIRSIADGPILKSXAHLLHRNKKVEFIEQINQIATLKERKRDPP

SEQ ID NO: 10209 - protein, 377 aa, Mycoplasma penetrans
MLEGEKMENKKKKVLVFGATGNIGFSSLEIIEKENYELVGFSFNNNYEKALEIINRFPNALVFSPSVKTKNTVNSFEELLEKTNPDIILNALVGFSGLHITLLALKNNVDLALANKESLVVAGWLIEDLKRSSSSRIYPVDSEHSSLYDSLKNNNKEIKELIITCSGGPFYKKEFNELLNINFADAVKHPNWNMGKKISIDSATMMNKCFEIIEAYYLFNTKKIKVYQHGQSIIHSMIKFTDNSYIANMSVPDMKLSIQQGLSGYESKTNLINDLSFNNLNLTFSEIDLDKWKPIHWAYDFLENQNRAIPIIMNAANEEAIVLFEENKIKFLDIFEIIEKAIIALENTEVNDLKDILNLNKNTRKYVYDFSKNKFRY

SEQ ID NO: 10210 - protein, 551 aa, Glycine max
MVQDMKQQDNGESKKKERHIVTWTQEEDDILREQIGIHGTENWAIIASKFKDKTTRQCRRRWYTYLNSDFKKGGWSAEEDMLLCEAQKVFGNRWTEIAKVVSGRTDNAVKNRFSTLCRKKQKYAALAKENSTSYINSNNKRMMLQHCNNMDTTSESGVPIKNLRRADIADDAEKIKFEDRSHLRNGTPINQQPRAPLAVLAQNSHNSNNLTDQHHLCNPKFSSSAQNNKIQGTFLKKDDPKISALMQQAELLSSLALKVDTENMDQSLENAWKVLQEFLNRSKESDIPGQKVPDVRLVDLKDMIEELKSGNEEGRVLQELLNRTKESDSTGHKIPDLRPADFKDMVEDSKSGNEEGQVLQEFLNRTNKSDIPEHKIPNLQLVDLKDMIEDLKSGNEEGQACWRKMDCYENSPGSSGYSTGSILICQSASDNLEHSLHQDIGTEMKSKQLEDEKGVKVVMPTANVDQDMVPCCMEQINNDGIVSTSSRLEFSSPLQVTPLFRSLAAGIPSPQFSESERNFLRKTLGMESPSINPSANSSQPPPCKRALLPSL

SEQ ID NO: 10211 - protein, 172 aa, Aquifex aeolicus VF5
MAIIKPYKGKYPKIHESVYLSENVVVIGDVEIGEDSSIWFGSVVRGDVNYIRIGKRTNIQDNCVVHVTHDTHPTIIGDNVTIGHRVVLHGCVLHNNILVGMGAVVMDGVEIEDYVIVGAGALVTPNKKIPSGVLVAGVPAKIVRDLREEEIKLIEESAQNYVNYKNEYLRSA

SEQ ID NO: 10212 - protein, 457 aa, Petunia x hybrida
MFDLNLCFEDEEELQFDNHNNSTETSNNSSSIINNIETTTTSSTCDDHEYISYSNNEYNNNSFVDFLKTDNNDQFLDSKELFPLSNGGEMAAPVNVYGNYGGTMEQRIIIPVQQQQQQQQQQVKKSRRGPRSKSSQYRGVTFYRRTGRWESHIWDCGKQVYLGGFDTAHAAARAYDRAAIKFRGLDADINFNVSDYQDDLKQMTNFTKEEFVHILRRQSTGFSRGSSQYRGVTLHKCGRWESRMGQFLGKKYIYLGLFDSEIEAARAYYKAAIKCNGREAVTNFELSTYEGELSTEADNGGASHNLDLNLGIASSSIADDQHDNTCLIGNSEFQCASIGLPEYRGAMNSPCTTMGSKMPHGRHLLWNGVNTSVFPTFKGTAIGKGMEVDSAPNWTWQDQNLYGGSSSVPLFSTAASSGFANSTTADVHQHYFSTGPLPYHHSPSLANMNFAQYYCRS

SEQ ID NO: 10213 - protein, 177 aa, Polytomella sp. Pringsheim 198.80
MSSRLYVGNLSWNAKEEDLRTYFGKFGEVEEASIALDRESGRSRGFGFVTLPADVAKDAIEKTNGAEFMGRNIKVNEASPPGERPPRTNNYGGGYGDFNGNGGGRDYGRGGYGRGNGGYGGRNAGYGGRGNFGGQGGYGDNRFGNDNFGGSYGGRGGYRGPRGPSAEENNSNNYGGY

SEQ ID NO: 10214 - protein, 311 aa, Xanthomonas axonopodis pv. citri str. 306
MLVIHGGAGVEKSSLSKDEQAQAREAMQRALRAGHAVLQRGGSAVDAVAATITVLEDAPQFNAGRGAVFTHDGRNELDAAIMDGASGKAGAITGVHTVKNPILLARSVMDRSKHVMLVGDGAEAFAREQGITLVDPAYFRTDKRWQQLQKALKAEAGDRQAQAELDLETAKHFGTVGALALDRDGHLAAGTSTGGMTNKRYGRVGDAPIIGAGTYANSQCAVSGTGWGEFYIRAVAAYDICARMKYAGQSLQQAAETVIDQQIPKAGGDGGAIALDAQGNLAFPFNTEGMYRGWIGADGTAHVAIFKDETL

SEQ ID NO: 10215 - protein, 329 aa, Xylella fastidiosa 9a5c
MNYTHLGRTGLKVSRIALGTMNFGELTDEATSFKIMDTALDAGINFFDTADVYGGPQTPDMPKGFGTSEEYIGNWLAQDKSRRDKIVLATKVYQPMETGPNDKYLSAYHIRRACEASLKRLKTDHIDLYQMHHIDRATPWEEIWQAFEQLIREGKITYVGSSNFAGWDIALAQCTAASRNLLGLASEQSLYNLTQRTIELEIIPALRHFGIGLIPWSPIGMGLLGGVLKKIASGRRATPGLQAQIDKLRPQLEAYEALCDELGQTPADVALAWLLHNPVVTAAISGPRTVEQLQQNLNALSVKLSDETLAKLDEIWPGPGGEAPQAYAW

SEQ ID NO: 10216 - protein, 167 aa, Oryza sativa
MAAVKEGADAGDSKILLISSDGQHFQVTEAEASMSKLVSNMIEDGCTENGVPLPNVASNVLAKVLEYCKKHAAAAAAAAEDVAVKDQELKSFDASFIDVDNTMLFGLILAANYLNVPSLLDLACQHTADLIKGKTVQEIRDTFGIVNDFTPEEEEEIRKENEWAFEN

SEQ ID NO: 10217 - protein, 364 aa, Chlamydophila pneumoniae CWL029
MSHTECGIVGLPNVGKSGLFNALTGAQVASCNYPFCTIDPNVGIVPVIDERLEALAKISNSQKIIYADMKFVDIAGLVKGASDGAGLGNRFLSHIRETHAIAHVVRCFDDPDVTHVSGKVNPVEDIEVINLELIFSDFSSAKNIHSKLEKLAKGKREVGALLPLFDTIIAHLEKGLPLRTLELTPEQIVALKPYPFLTMKPMFYIANVDESSLPDMDNDYVAAVREVAAKENSKVVPICVRIEEEIVSLPIEERLEFLMSLGLEKSGLHRLVRAAYDTLGLISYFTTGPQESRAWTVVRGSSAWEAAGEIHTDIQKGFIRAEVITFEDMIECQGRAAARELGKLHIEGRDYIVQDGDTMLFLHN

SEQ ID NO: 10218 - protein, 361 aa, Listeria innocua
MKKFILASLACTTLISFSPLAEQVEVNAATTNIATAPEKNLQEAPPATVDQIFPDDALAFKVAQELGVSQDTVVTQEQLDTIKTMVYIAFGVEDLTGMEYLHNLKLVDLSQNNISNLDNLANLTELEIVSLNYNQITDITPLMNLPKLNNLELGVNQISTLPSFENLTNLKILNLSSNQLKDISALKDTPLLTNLSISANNISDISVLSEFDNLQVFYADSNQLTSIEPLRNKTQLEYFNANFNQIKDVTPLSTIPTIKSIKIEENQISDFSSLAGHRLELFEAAGQNVYLPDVALGDSTNIVIKDNFGVTLHDWVWYTPGTYSNDTLTWENAGDNSAYFLNKQYPTIPSVTVTVYQTVTP

SEQ ID NO: 10219 - protein, 210 aa, Lycopersicon esculentum
MAMVNLNGISKEVHYRGVRKRPWGRYAAEIRDPGKKSRVWLGTFDTAEEAARAYDNAAREFRGAKAKTNFPKLEMEKEEDLKFAVKNEINRSPSQTSTVESSSPVMVDSSSPLDLSLCGSIGGFNHHTVKFPSSGGGFTGSVQAVNHMYYIEALARAGVIKLETNRKKTVDYLGGGDSDSSTVIDFMRVDVKSTTAGLNLDLNFPPPENM

SEQ ID NO: 10220 - protein, 264 aa, Streptomyces purpurascens
MSSRFTPTSRVAVVTGATSGIGLSVTRSLAAVGHRVFLCARDADRVALTVKELRAEGHDVDGAACDVRDVAQIESLVSAAVERYGPVEVLVNNAGRSGGGPTHTIADELWDDVMATNLDSVFRVTRAVLTTGRMREGGWGRVVNIASTGGKQGVVLGAPYSASKHGVVGFTKALGLELAKTGITVNAVCPGYVETPMAVRVRQGYAAAWETSEEEVLDRFQAKIPLGRYTTPDEVAGMVGYLLTDAASSVTAQAINVCGGLGNY

SEQ ID NO: 10221 - protein, 342 aa, Malus x domestica
MADLKSKFLKVYSVLKSELLEDPAFDFTNDSRQWVERMLDYNVPGGKLNRGLSVIDSYQLLQQGRELTEDEIFLASALGWCIEWLQAFFLVLDDIMDGSHTRRGQPCWFRLPKVGMIAVNDGVVLRNHIPRILRKYFREKPYYVDLLDLFNEVEFQTASGQMIDLITTIEGEKDLSKYSLSIHRRIVQYKTAYYSFYLSVACALLMSGEELEKHIDVKNILVEMGIYFQVQDDYLDCFGDPETIGKIGTDIEDFKCSWLVVKALELCNEEQKKVLHENYGKPDPENVATVKALYKELDIEGVFADYESKSYKKLTSWIEGHPSKAVQSVLKSFLGKIYKRQK

SEQ ID NO: 10222 - protein, 141 aa, Triticum aestivum
MASGSIVKKEVGENHDVLRFGVNNSVKGDLAPQHPIQATVHKEARFWADKKRFGAEAIYGSAFNIRKDLNAQILSKFQRPPGALPSSMLGYEALTGSLDDFGFEDYLNLPQDSDSFHAPDMHHGMEVRLGLSKGPICPSFN

SEQ ID NO: 10223 - protein, 379 aa, Arabidopsis lyrata subsp. petraea
MITTGQIIRCKAAVAWEAGKPLVMEEVEVAPPQKHEVRIKILFTSLCHTDVYFWEAKGQTPLFPRIFGHEAGGIVESVGEGVTDLQPGDHVLPIFTGECGDCPHCHSEESNMCDLLRINTERGGMIHDGESRFSINGKPIHHFLGTSTFSEYTVVHSGQVAKINPDAPLDKVCIVSCGLSTGLGATLNVAKPKKGQSVAIFGLGAVGLAAAEGARIAGASRIIGVDLNSQRFDQAKEFGVTEFVNPRDHDKPVQQVIAEMTNGGVDRSVECTGSVQAMIQAFECVHDGWGVAVLVGVPSKDDAFKTHPMNFLNERTLKGTFFGNYKPKTDIPGVIEKYMNKELELEKFITHTLPFSEINKAFDYMLKGESIRCIITLGA

SEQ ID NO: 10224 - protein, 180 aa, Musa acuminata
  unsure (1)..(180): unsure at all Xaa locations
MAKSYPTVSEEYQKAVEKAKRKLRGLIAXKNCAPLMLRLAWHSAGTYDVVSKTGGPFGTMRFPAELAHGANNGLNIAVRLLEPIKEQFPILTYADFYQLAGVVAVEVTGGPEIPFHPGREDKPEPPVXGRLPDATKGSDHLRDVFGHMGLSDRISLHYLVDTHWEGAXRXDLVSKGLGLP

SEQ ID NO: 10225 - protein, 149 aa, Thermoplasma acidophilum
MRSDSVKRIVADIKGVGTSRVYIDTNKVDRVMEAATRQDVIALMKQDVIKIKQKKGISNGRLKKRIKQLSKDRRRGPGSLRGTKYARYPRKDRWIDTIRALRDELRTLKSEGKITKETYRKYYRFIKSGSIRSRSQLLSHLKSAGLVGE

SEQ ID NO: 10226 - protein, 119 aa, Dioscorea tokoro
GGVMIGDGQSRFSINGKPIYHFVGTSTFSEYTVVHVGCVAKINPSAPLDKVCVLSCGISTGLGAALNVAKPVKGSSVAVFGLGAVGLAAAEGARIAGALRIIGVDINPKRFNAAKKFGV

SEQ ID NO: 10227 - protein, 140 aa, Zea mays
MQSFSMKREISEAHDTIRFGINAGVKADLAPPHPLQSTIQSETKFWADKKKFGTDAIYGSALNIRKDLDAQILSRFQRPPGALPSSLLGYEALTGSLDDFGFEDYLNMPHDSDSFRQPDMHHGMEVRLGLSKGPICPNFN

SEQ ID NO: 10228 - protein, 408 aa, Azotobacter vinelandii
MCWCRTCRAVWKTSPHWWYRNCSGAACSGANTGAALCANTSAWRARKAPSSPDRPPSGGFPMTYVAVPNRYERIPYRRVGRSGLVLPALSLGLWHNFGDSSPLDTQRALLRAAFDLGINHFDLANNYGPPYGSAETNFGRLLREDFRAYRDELILSTKAGWDMWPGPYGQGGGSRKYVLASLDQSLRRLGVDYVDIFYSHRFDADTPLEETAGALADAVRQGKALYVGISSYSAGKTREIAALLREHKVPLLIHQPAYNLFNRWVEKDLLATTEDLGAGVIAFTPLAQGLLTDKYLDGIPADARINRPGGASLRPEHLSEANIRRARALAEIARRRGQSLAQLALAWTLRDPRVTSALIGASRPEQLVENVAALDNLAFSTEELAEIDRHAVEGGINLWEKPSSDWQA

SEQ ID NO: 10229 - protein, 1316 aa, Schizosaccharomyces pombe
MVMQERNSNEDNKVNHGIDNIYVLELDLDGSVLFASTNFSQITGSLELTGKPAALLSSDQEIFNAAIEQLLDDDSHSVKIHTVISKLPSLEENVFVQDEEMELQSKSVELDCVGVLIRDPLTSRPSHTLWVLQPLKPTRITRQEIGQQLTETLGFGAQLLAQHLEKLQTVPSTDSLPPFETVLCRVCDHEIQNWYFEHHTELCLLIHHAEARAQEANDLLNEQRNALQSLLDSLDDQIEPDVSYLGVPLAAVLPSSITSSAKSNSRSSLSQKIRNYISNMLFDAISYTDSCLAIHLPFIPESTTREDNQPFSEIRLLSPASEVFNAKTLSWCLPHIDDPGLQLMFENTDALVKKKLDAINRLSNIIYYSERVRCEIEDQVQTIIEQSIQVDGYDEPLSTTTPTLIEPIQETLMTQSPIIECEPFNTVKPSVSPEEVHDISQFNHRNDPPITAASVDSSNSFSVHRSSTNHSSTNSGSPNLSRRNNLAIPIASRRKSVSAVNTLYGVGSSYTSESFPFSKLTVPVERNSFRETESPKPFLSRQIGISTLSSNISSGKGTPSIQDYEIIKPISKGTFGTVYLSRKNTTGEIYAIKVLRKVDMISKNQVANVKAERAVLMAQEESAFVAKLYYAFQSRDYLYLVMEFMNGGDCASLLKSLYTIPESWAKIYIAEVALGLEHLHRLGIIHRDIKPDNILMSITGHLKLADFGLSQLGLTTRQLRLQKGKNNILSPPSFQSPTALGDPGDNIASSPLILPTSVSAFSYDEKSQKQKTELATFTTYKEDDTTTTTRTSIDSISSKYLESPVDSQKVNRTPNLQSVPFFRQPDAPKRFVGTPDYLAPETLRGSTQDDMVDWWALGCVLFEFLFGYPPFHAETPEKVFENILANNIAWPDLEMYPCSEEALDLINGFLQPNPERRLGFSDINEIKEHPFFNGINWDDIFSHEAPFIPAPETPLDTAYFDSRGAGAAESNMSSSVNSGEEVSKDNNVSQERGSQFLRSSHGRSRERSTSARRSRRFSEANSEFDEFGPFSYKNLSVLERANRNAIEKIRSEIAGKLHISPPDPHIGYTPGSDMPSAKLYDQQLTLSPSLMTNQGSNFSSTDSTPRKSINSSDVESRSKTDGPKSMHDLIKQLHMRKHSSHTNQSTGSSESDDLFNLDLPISNLETSYPFKIEEGQASPLSSPLSKTPPFFSSSVPLKALICVSKLNLFSELIKLLKSYKFQVSIVTDEDKMLRTLMADEKFSIIFLQLDLTRVSGVSILKIVRSSNCANRNTPAIALTPTRIDINAAIPRMFDGRLYLPINAFLLRGYIARLCNK

SEQ ID NO: 10230 - protein, 362 aa, Nostoc punctiforme
MTQNYRITLLPGDGIGPEIMAVAVDVLKVVGKQFDLKFEFQEALIGGAAIDATGEPLPSATLETCRNSDAVLLAAIGGYKWDSLPSNLRPEAGLLGLRAGLGLFANLRPAKILPQLIDASTLKREVVEGVDIMVVRELTGGIYFGKPKGIFATETGEKRGVNTMVYTESEIERIGRVAFEAARKRGGKLCSVDKANVLEVSQLWRDRITQLSQEYPDIELSHLYVDNAAMQLVRAPKQFDTIVTGNLFGDILSDAAAMLTGSIGMLPSASLGASGPGVFEPVHGSAPDIAGQDKANPLAQVLSAAMMLRYALDQPKAADRIEQAVFQVLEQGDRTGDIISPGKNLLGCRAMGDSLIKALEQK

SEQ ID NO: 10231 - protein, 342 aa, Zea mays
MEYTRLGKSGLKISKVVLGGMSYGSSEWRKWVLDEEDSLPLIKHAFDSGINTWDVADTYSDGASERIVGKALKQYNIPRNRVVILTKCFFAVAEPGDDKDIKGKDTAQWVNRVGLSRKHIFDAVDASVERLGTYIDVLQIHRLDKDTPREEIMKALNDVVESGKVRYIGASSMAAWEFQTLQNIADKHGWHKFISMQNYYNLIYREEEREMIPYCNDTGVGLIPWSPIARGALARPFDARSTVRETSDPFLTSLIRSKETETDKTIIGRVQEVAEKKGVSMAKVAIAWALQKGTSPIVGLSSKERIDDAVEAVKWQSGGGLTEEDCKYLEEGYAPKAVAVVM

SEQ ID NO: 10232 - protein, 393 aa, Nitrosomonas europaea ATCC 19718
MSHVMNTYARLPVTFVKGEGVWLWDDQGNRYLDALSGIAVCGVGHCHPVLVKALCEQVSTLIHTSNVYHIQHQERLADRLTSLSGLEKAFFCNSGAEANEAAIKLARLYGHNQGINLPTIIVMERSFHGRTMATLTATGNRKTQAGFEPLLTGFVRVPYDDLEAVNKVAANNREIVAILLETYQGEGGVNFPQANYLQGLRRICDQNGWLLMLDEVQCGLGRTGKWFAFQHSEVMPDAMTLAKGLGSGVPIGACLAGGKAAEVFKPGNHASTFGGNPLACRAALTTLDIIEQEGLMDNAVTIGNFMWEEFGRRLQAWQDVLKIRGQGMMIGIELPVPCSELVPEALKRRVLVNVTSEKVVRLLPALNMQKAEAEQVVTEVSALITWFLESRVK

SEQ ID NO: 10233 - protein, 371 aa, Schizosaccharomyces pombe
MCAKKIVVLPGDHIGPEIVASALEVLKVVEKKRPELKLEFEEHKIGGASIDAYGTPLTDETVKACLEADGVLLGAVGGPEWTNPNCRPEQGLLKLRKSMGVWANLRPCNFASKSLVKYSPLKPEIVEGVDFCVVRELTGGCYFGERTEDNGSGYAMDTWPYSLEEVSRIARLAAWLAETSNPPAPVTLLDKANVLATSRLWRKTVAKIFKEEYPHLTLKNQLIDSAAMLLVKSPRTLNGVVLTDNLFGDIISDEASVIPGSLGLLPSASLSGVVGKSEEKVHCLVEPIHGSAPDIAGKGIVNPVGTILSASLLLRYGLNAPKEAEAIEAAVRKVLDDTSIGGRGLYTRDLGGEASTADITKAVVEELEKIL

SEQ ID NO: 10234 - protein, 108 aa, Glycine max
  unsure (1)..(108): unsure at all Xaa locations
VQDEMMDLMDVSNEIQETXLGRSYNVPDDIDEDDLMGELDALELDMGNETEADGVPSYLQPDKEPDLDAELNLPPAPTGQTAVPPGRSNAQTEDELGLPAVPQASIRG

SEQ ID NO: 10235 - protein, 341 aa, Rhodobacter sphaeroides
MRALVKAKAEPGLWMEERPVPEIGPDEVLIRVRKTGICGTDVHIWNWDDWAAKTVPVPLVTGHEFAGEIVEVGRDVRDLSPGQRCSGEGHLIGHHSRQVRAGRFHLDPETRGIGVNVPGAFADYLRLPAFNVVPLPDAIDDEVGAILDPLGNAVHTALSFDLVGEDVLVTGAGPIGIMAAAVARHVGARHVVITDVNADRLRLSTEVADVVPVNVATEDLRSVMGRLKIVQGFDVGMEMSGAPAGFDQMVEAMVMGGRIAMLGIPPGRSPVDWSRIVFKALTIKGVYGREIFETWYKMIAMLENGLDIRRVITHRFPVADFAEGFAAMRSGASGKVVLDWG

SEQ ID NO: 10236 - protein, 425 aa, Brassica deflexa
YHHSYTLFFFVVLVLFPHVFSTTNTLSSNETLTISSNKTLVSPGDVFELGFFKTTTRKSQDGTDHCWYLGIWYKTTTSNQRTYVWVANRDNPLHNSTGTLKISHASLVLLDQSNTPVWSTNHTGVAHLPVTAELLANGNFVLRDSKTNDLDRFMWQSFDFPVDTLLPEMKLGRKINSSEKEKILTSWKSPTDPSSGDYSLILETEGFLHEFYLFNNDFKMYRTGPWNGVRFNGIPKIQNWSYIDNNFIDNKEEVAYTFKVNNNNNHNIHTRFRMSSTGYLQVITWTKTIPQRNMFWSFPEDACDLYQVCGHYAYCDMHTTPTCNCIKGFVPKNASAWGLRDMSGGCVRSSKLTCGEGDGFLRLGQMKLPEPNEAFVDKRIGLKECKEKCVRACHCTGFAGMDIMNGGSGCVTWTGELVDMRKYDA

SEQ ID NO: 10237 - protein, 403 aa, Brucella melitensis 16M
MTDATTVHPLYDTYNRAALRFERGEGIWLITEDGERYIDFAAGIAVNSLGHSHPHLVETLKTQAEKLWHLSNVYEIPAQEKLGRRLVESTFADKVFFTNSGAEALECAIKTARRYQYVSGHPERFRIITFEGAFHGRTLATIAAGGQAKYLEGFGPKVEGFDQVPFGDEAALRAAITPETAGILLEPIQGEGGLRAFPEEFLRLVRQICDENGLLLLLDEVQTGVGRTGKLFAHEWAGIRPDIMAIAKGIGGGFPIGACLATAEAAKGMTAGMHGTTYGGNPLGMAVGNAVLDVVLADGFMENVQATALVMKQGLASLVDRYPNVVSEIRGRGLLMGLKCVVPNTSLIQALRDEHILSVGAGDNVVRLLPPLITTPEEAREALKHIETAVERLSIANPISKTV

SEQ ID NO: 10238 - protein, 850 aa, Brassica oleracea
MRIFRKTLVSFPLFIFLFLYESSTAQDTIRRGGFLRDGSTHKPLVSPQKTFELGFFSPGSSPGRYLGIWYGNIEDKAVVWVANRENPISDRSGVLTISNDGNLVLLNGQNITVWSSNITSTNNDNNRVGSILDTGNFELIEVSSERVIWESFNHPTDTFLPHMRVRVNPQTGDNLAFVSWRSENDPSPGNFSLGVDPSGAPEIVLWGRNNTRRWRSGQWNSAIFTGIPNMALLTNYLYGFKLSSPPDETGSVYFTYVPSDPSVLLRFKVLHNGTEEELRWNETSKRWTKFQAAPESECDKYNRCGSFGICDMRGDNGICSCVKGYEPVSLGNWSRGCRRRTPLRCERNVSNVGEDEFLTLKSVKLPDFETPEHSLADPEDCKDRCLKNCSCTAFTFVNGIGCMIWNQDLVDLQQFEAGGSSLHVRLADSEIGESKKTKIVVIVAVLVGVLLLGIFALLLWRFKRKKDVSGTYCGHDADTSVVVVDMTKAKDTTTAFTGSVDIMIEGKAVNTSELPVFCLKVIVKATNDFSRENELGRGGFGPVYKGVLEDGQEIAVKRLSGKSGQGVDEFKNEIILIAKLQHRNLVRLLGCCFEGEEKMLVYEYMPNKSLDFFIFDEMKQELVDWKLRFAIIEGIARGLLYLHRDSRLRIIHRDLKVSNVLLDGEMNPKISDFGMARIFGGNQNEANTVRVVGTYGYMSPEYAMEGLFSVKSDVYSFGVLLLEIISGKRNTSLRASEHGSLIGYAWFLYTHGRSEELVDPKIRATCNKREALRCIHVAMLCVQDSAAERPNMAAVLLMLESDTATLPVPRQPTFTTSTRRNSMDVNFALDSSQQYIVSSNEITSTVVLGR

SEQ ID NO: 10239 - protein, 338 aa, Sinorhizobium meliloti
MKAVVCSEPGRLALVARSGPEAPPPGSVRLAVSRVGICGTDYHIFEGKHPFLEYPRVMGHEISARVIEGGPGTRLAPGTLVVVNPYLSCGECIACRKGKPNCCTAIRVLGVHTDGAFCEEIVMPEQNLYPAEGLSPEAAAAVEFLAIGAHAVRRSAAGRGVRSLVIGAGPIGLGTAVFSRIAGHDVRLLDTSEERLAFATEKLGFSPGILAGDDAALAQATGGDGFDVVFDATGNAQSMERAFGHVAHGGTLVFVSVVKEEIRFSDPEFHKREMTLVASRNATREDFDHVIQSLAAGLVPIEALVTHRTTLEDLVRDLPRWVHDKSGLVKAVVAVSAG

SEQ ID NO: 10240 - protein, 364 aa, Chlamydia muridarum
MGQTECGIVGLPNVGKSGLFNALTGAQVASCNYPFCTIDPNVGIVPVVDSRLEILARISQSHKIIYADMKFVDIAGLVKGAASGAGLGNRFLSHIRETHAIAHVVRCFDNDDVTHVSGKIDPEEDIAVINLELILADFSSATSVRDKLSKQAKGKKDIGQLIPILDRVIEHLESGNPVRTLSLSSEEGSLLKPYPFLTGKPMLYIANIDEDSLTDLDNPYVQKVRRIAQQEGANVVPICVKLEEEILSLPPEERQDFLHSLGLQESGLNRLVASAYQTLGLISYFTTGPQETRAWTISKGATAAEAAGEIHSDIQKGFIRAEVVTLEDIVTYNGRAGAREAGKLRAEGRDYIVQDGDIMLFLHN

SEQ ID NO: 10241 - protein, 434 aa, Hordeum vulgare
MQVRRDDDGAGGCAGDAVPGGGEGQDGVPARQPAGRVWGVSRAARATSGFKVLALGPETTGVIQRMQQLLDMDTTPFTDKIIAEYIWVGGSGIDLRSKSRTISKPVEDPSELPKWNYDGSSTGQAPGEDSEVILYPQAIFKDPFRGGNNILVICDTYTPQGEPIPTNKRHMAAQIFSDPKVTSQVQWFGIEQEYTLMQRDVNWPLGWPVGGYPGPQGPYYCAVGSDKSFGRDISDAHYKACLYAGIEISGTNGEVMPGQWEYQVGPSVGIDAGDHIWASRYILERITEQAGVVLTLDPKPIQGDWNGAGCHTNYSTLSMREDGGFDVIKKAILNLSLRHDLHIAAYGEGNERRLTGLHETASISDFSWGVANRGCSIRVGRDTEAKGKGYLEDRRPASNMDPYTVTALLAETTILWEPTLEAEALAAKKLALKV

SEQ ID NO: 10242 - protein, 469 aa, Pseudomonas aeruginosa PAO1
MDGQHLHQGELKRGLKNRHIQLIALGGAIGTGLFLGSAGVIKTAGPSMILGYAIGGFIAFLIMRQLGEMIVEEPVAGSFSHFAHKYWGGFAGFLSGWNYWVLYILVGMSELTAVGKYIQYWWPDVPTWATAAAFFVLINAINLANVKAFGETEFWFAIIKVAAIVGMILLGIYLLVGGGGGPQASVSNLWDRGGFFPNGLSGLVMTLAIIMFSFGGLELVGITAAEASEPRKVIPKAINQVIYRILIFYIGALAVLLSLYPWDQLVETINASGDDYSGSPFVQIFSLIGSGTAANILNFVVLTAALSVYNSGVYCNSRMLYGLAAQGDAPKVLMSVDRRGVPVLSILVSALITFLCVIVNYVLPHKALELLMSLVVAALVINWAMISLSHLKFRAAMKRQGVDTFFKALWSPFSNYLCLAFVLFILGIMLMIPGINISVYAIPFWLLLMWLCYRVKLSLAERRGLGQQA

SEQ ID NO: 10243 - protein, 592 aa, Saccharomyces cerevisiae
MTEDFISSVKRSNEELKERKSNFGFVEYKSKQLTSSSSHNSNSSHHDDDNQHGKRNIFQRCVDSFKSPLDGSFDTSNLKRTLKPRHLIMIAIGGSIGTGLFVGSGKAIAEGGPLGVVIGWAIAGSQIIGTIHGLGEITVRFPVVGAFANYGTRFLDPSISFVVSTIYVLQWFFVLPLEIIAAAMTVTYWNSSIDPVIWVAIFYAVIVSINLFGVRGFGEAEFAFSTIKAITVCGFIILCVVLICGGGPDHEFIGAKYWHDPGCLANGFPGVLSVLVVASYSLGGIEMTCLASGETDPKGLPSAIKQVFWRILFFFLISLTLVGFLVPYTNQNLLGGSSVDNSPFVIAIKLHHIKALPSIVNAVILISVLSVGNSCIFASSRTLCSMAHQGLIPWWFGYIDRAGRPLVGIMANSLFGLLAFLVKSGSMSEVFNWLMAIAGLATCIVWLSINLSHIRFRLAMKAQGKSLDELEFVSAVGIWGSAYSALINCLILIAQFYCSLWPIGGWTSGKERAKIFFQNYLCALIMLFIFIVHKIYYKCQTGKWWGVKALKDIDLETDRKDIDIEIVKQEIAEKKMYLDSRPWYVRQFHFWC

SEQ ID NO: 10244 - protein, 174 aa, Helianthus annuus
GFQVGPSVGIDSGDHIWRARYLLERITEQAGVVLTLDPKPIEGDWNGAGCHTNYSTKAMREDGGFEVIKKAILNLSLRHTEHISAYGEGNERRLTGKHETASINQFSWGVANRGCSIRVGGDTEKAGKGYLEDRRPASNMDPYTVTGLLAETTILWEPSLEAEALAAQKLALNV

SEQ ID NO: 10245 - protein, 223 aa, Deinococcus radiodurans
MIWLPLTLLAFVAGMLLQLRVRSPLANPTLVATLVVLAALLLSRTAYPYYHAQVQPLTELLAPAVVALAVPLYQQRALLARQWQALLVGGMLGTAVGMGTDTLLARALHLGHAAERSLMTATATSPVTVQLAQFTGAPAELAATLAVLSGLVGALILPPLLTRLGVRHPLARGIAIGSVAHGVGTARAREEGSITGAASSIGMGLGAVLVTLVVALLAGLAAR

SEQ ID NO: 10246 - protein, 309 aa, Oryza sativa
MACSLLPPLAPVSPPPRLLLPSSRSALLPRGPRVAPRVPVSPPRALPDTAVGAAEALRGALADAFLASPPTWRSAAVSNLAIFVAGSPVLLSGLSASGFAAAYLLGTLTWRAFGPKGLVLVASYFVLGTAATKLKIKQKEALGVAEKRGGRRGTGSVIGSSAAGCVCALLSIYNVGSAALAELWRLGFVASYCTKLSDTVSSEIGKAYGRTTYLVTTLKVVPRGTEGAISIEGTLAGILASIILASVGYLLGQVNVSQGAVCVLASQIANFCESYIGATLQDKEGFEWLEKPLRLPARGATWIARRSNT

SEQ ID NO: 10247 - protein, 394 aa, Guillardia theta
MLLLLETINGYSIYKKIKKNNNQSIFNLNSIYEFESSKISENSFVKIQSGKMPKNLKKFLINNSNKDEILIVGDPYIKMYISNNLQLKFKKIVTNKSSIYNLKKKLNETKLDKNYFFSPKLSHIISHNIYSIKLKINSKKLDNMIIYSIKLYEEIEKEIFHYYNIQKEWYSWHFPELSKIVTDPEMYSLLIKRIEKKENLHKIDISDIVDDNIKKNIYQNLKISIGTKIHDDDLNAILILTDHIISMIRIKKMLNEYIKHRMYYSAPNLCSIIGEKIGSKLISAAGSLLNLSKLPASTIQIIGAEKSLYKALKTKGKTPKFGLIYNSRVIQKCSPKLKGKISRILSAKTSICVRVDALGESNLGGCIGIKYREILENRLKQFDSFFNLSINIKK

SEQ ID NO: 10248 - protein, 368 aa, Corynebacterium glutamicum ATCC 13032
MSTVVPGIVALSKGAPVEKVNVVVPDPGANDVIVKIQACGVCHTDLAYRDGDISDEFPYLLGHEAAGIVEEVGESVTHVEVGDFVILNWRAVCGECRACKKGEPKYCFNTHNASKKMTLEDGTELSPALGIGAFLEKTLVHEGQCTKVNPEEDPAAAGLLGCGIMAGLGAAVNTGDIKRGESVAVFGLGGVGMAAIAGAKIAGASKIIAVDIDEKKLEWAKEFGATHTINSSGLGGEGDASEVVAKVRELTDGFGTDVSIDAVGIMPTWQQAFYSRDHAGRMVMVGVPNLTSRVDVPAIDFYGRGGSVRPAWYGDCLPERDFPTYVDLHLQGRFPLDKFVSERIGLDDVEEAFNTMKAGDVLRSVVEI

SEQ ID NO: 10249 - protein, 539 aa, Listeria monocytogenes EGD-e
MKKTIKITTSLLLSFACVFSIGDFTKPHTVEAEIVYSLTNPKPVNEIFTDPKLAQVVADWLKLPAATSSVTQTQLNTIKALHFDSKGVQSLEGVEYLKNLTQVFGYGNQVSDLGPLSNLTKLEVIQMPRNQISDLTPIANLTALMSLDFEFNNLQTIEPIKNLTNMLELNVSANPISDINAVKNMTQLEFLTLRDCEVSDLSPVENLSNMLMFWAGRNNISDITPLKNMSKLLGLSLFGNQIKDVSVIKNLTSLEDFDIKANQVSDISSLATSTTLETLTLSFNQIIDISPLKNLTNLTRLELENQTRALDAVEIDNPLILPAPVIDENGSRVQPSKVSHAGVYANGEITWEGLQSNYILNYEYALPVTIGSLTTTYSGKITQPLLEKPVDPVTPVDPVDPVDPVDPVDPVDPVDPVDPVDPVDPVDPVDPVDPVNPVDPVDPVDPVDPVDPVNPVDPVNPVNPDPVNPMKPVEPIIPVTLENQFTLVNQTISVNEEIATQPAKDIVKLPKTGESGMTSSLFGGLILTVTSAILLRKRK

SEQ ID NO: 10250 - protein, 433 aa, Zea mays
MVLDLNVASPADSGTSSSSVLNSADGGFRFGLLGSPVDDDDCSGEMAPGASTGFMTRQLFPSPTPPAEPEPEPVAAPVPVWQPQRAEDLGMAQRPVAPAKKTRRGPRSRSSQYRGVTFYRRTGRWESHIWDCGKQVYLGGFDTAHAAARAYDRAAIKFRGLDADINFSLSDYEDDLKQMRNWTKEEFVHILRRQSTGFARGSSKYRGVTLHKCGRWEARMGQLLGKKYIYLGLFDSEVEAARAYDRAALRFNGREAVTNFEPSSYNAGDNNLRDTETEAIDDGDAIDLDLRISQPNVQDPKRDNTLAGLQPTCDSPESSNTMASQPMSSSSPWPGYHQNPAVSFHHQRLYSSACHGFFPNHQVQERPVERRPELGAQPFPSWAWQAQGSPHVPLHHSAASSGFSTAAGANGGMPLPSHPPAQFPTTTNPFFFP

SEQ ID NO: 10251 - protein, 78 aa, Triticum aestivum; identical to SEQ ID NO: 7127

SEQ ID NO: 10252 - protein, 154 aa, Cryptococcus neoformans var. neoformans
MVKAVAVLKGDSHVYGTITFTQDSEGAPVCVSGEIKNLDADAKRGFHVHEFGDNTNGCTSAGPHYNPFHKNHGGPTAAERHVGDLGNVQTNGCGVAMVDISDKVISLFGPHSIIGRSMVVHAGTDDLGKGGNEESLKTGNAGARLACGVIGIAA

SEQ ID NO: 10253 - protein, 506 aa, Brassica oleracea
MTSINVKLLYHYVITNLFNLCFFPLTAIVAGKAYRLTIDDLHHLYYSYLQHNLITIAPLFAFTVFGSVLYIATRPKPVYLVEYSCYLPPTHCRSSISKVMDIFYQVRKADPSRNGTCDDSSWLDFLRKIQERSGLGDETHGPEGLLQVPPRKTFAAAREETEQVIIGALENLFKNTNVNPKDIGILVVNSSMFNPTPSLSAMVVNTFKLRSNVRSFNLGGMGCSAGVIAIDLAKDLLHVHKNTYALVVSTENITYNIYAGDNRSMMVSNCLFRVGGAAILLSNKPRDRRRSKYELVHTVRTHTGADDKSFRCVQQGDDENGKTGVSLSKDITDVAGRTVKKNIATLGPLILPLSEKLLFFVTFMGKKLFKDKIKHYYVPDFKLAIDHFCIHAGGKAVIDVLEKNLGLAPIDVEASRSTLHRFGNTSSSSIWYELAYIEAKGRMKKGNKVWQIALGSGFKCNSAVWVALNNVKASTNSPWEHCIDRYPVKIDSDSGKSETRAQNGRS

SEQ ID NO: 10254 - protein, 234 aa, Zea mays
  unsure (1)..(234): unsure at all Xaa locations
MATNVPTRNRMFRTCCPGAVTNGNEAGNADVEYIDSENLVDLPDVDAALCTLVKRLDSKDWVMTCEALNNVRQLAMYHKERLQELLEPLVPLIGKSVKSPRSAVCKTXMMTCAGILXGYGDVLVESIDALVSIAIHLKFLVLAKRSLKTSFCQLLHSQLVQLFLKASQDKRFVCEAAEAALTSMTSWISPLLLLPRMQPYLKNRNPRVRAKASVCLSKSVPCLDVXGIREYGMD

SEQ ID NO: 10255 - protein, 162 aa, Oryza sativa
  unsure (1)..(162): unsure at all Xaa locations
MAAAAATSRLLRRHPPPLPLLLRSSISSSRPLLQQPELSPAAAADAAPATXXAAPLPPKPSTGSPFYGENWRNPAAAANPSSSSLLPAXXVGGGAHARAAAYSASPGAAELKETFAEWMAEQRWEEMKQLFEFWVRSLDPASGKPNRPDVDLFNHYLRAQLX

SEQ ID NO: 10256 - protein, 154 aa, Solanum tuberosum
KFRSHSTGHSLVVPGENLDRYTLRLPEKVRKDVMDRALLNRTRSCAVTLPRHGSTTRGYRAGPGEGSNRGTRSFKRIDRFDPEAKSDRWFLKIAPPFFTRGSSMKSPKLRADNEEASTSRSNVKVAVKMPSFKCLEPKGDEPGLLANDSARSPV

SEQ ID NO: 10257 - protein, 179 aa, Pseudomonas aeruginosa UCBPP-PA14
MALLAEVLNPVACKVGPEIGRDQLLALCERLDPRREPGRLTLIARMGAQKVGERLPPLVEAVRAAGHPVIWLSDPMHGNTIVAPCGNKTRLVRSIAEEVAAFRLAVSGSGGVAAGLHLETTPDDVTECVADSSGLHQVGRHYTSLCDPRLNPWQALSAVMAWAGAEATPSATFPLETVA

SEQ ID NO: 10258 - protein, 166 aa, Pinus taeda
MASAVSSRRELEDVFRKFDTNGDGKISKSELSALISEAEIEGVMKEVDSNKDGFINFDELVEANSKNLNAASLMRNSASAVQCATLPGRLELEDVFRKFDTNGDGKISKSELSAILKCRSSEEEIDGVMKDVDSNKDGFISFDEFVAANSNGLNAARLMLGLASAN

SEQ ID NO: 10259 - protein, 154 aa, Castanea sativa
MALSLFGGRRSNVFDPFSLDIWDPFEGFSAVANVPPSARETTAFATARIDWKETPEAHIFKADLPGLKKEEVKVEVEDGNVLQISGERSKEHEEKNDKWHRVERSCGKFLRRFRLPENAKVEQVKANMENGVLTVIVPKEEQKKTEVKSIEISG

SEQ ID NO: 10260 - protein, 398 aa, Bradyrhizobium japonicum USDA 110
MTTATHPYDALMDITARPKAVFVRGAGSYLWDDSRKRYLDFVQGWAVNCLGHSPSAIADALAAQAKRLLTPSPAFYNEPSLKLAQALVANSAFDQVFFANSGAEANEGAIKLARKYGSLHKGGAFEIISFEGGFHGRTLATMSASGKKAFEPLFEPKVAGFKKAKLNDIASVEKLINDNTVAVMLEPIQGESGVWPATDQFLQELRALTKAHGLLLILDEIQTGMGRTGKLFHYEHTGIAPDIMTLGKGIGGGVPLAALLATERAACFEHGDQGGTFNGNPIMCAAGLAVLDEVGKPDFLKSVTETGLLLESELQKVSARHGLGGVRGRGLLLALDLKLPIAPGIVAQAFEAGVLLNAPQVDTLRFMPALNVTRAEIAEMIDCLDAILTKAGAARRVA

SEQ ID NO: 10261 - protein, 445 aa, Oryza sativa
  unsure (1)..(445): unsure at all Xaa locations
TRRPPPPPLTXHRHRPRLRPSRVTACLATPTPTPPPPKLSAASRAVVEDEARYIVGTYNRSRVVLVAGRGCKLYDADGREYLDMAAGIAVNAVGHADPDWVAAVSAQAATFVHASNVQYTVPQATLAKRLVEASFADRVFFANTGTEANEAAIKFARKYQRVARPDGDAPTEFMSFTNCFHGRTMGSLALTSKVQYREPFAPVMPGTTFAEYGNLEXGKKVIQSGKIAAVFVEPMQGEGGIHSATKEFLQGLRDACDEAGALLVFDEVQCGLGRTGYLWAYEAYGVVPDIMTLAKPLAGGLPIGVVLVTEKVASAINFGDHGTTFGGGPLVCQAALTTLDKIQKPGFLAEVAKKGENFKQLLSTKLSGNAHVKEIRGIGLIVGIELDVPAGPLVDACLDRGVIVLTAGKGNVVRLVPPLIISEKELEQAAEVIRDCLPALDASTS

SEQ ID NO: 10262 - protein, 323 aa, Fusobacterium nucleatum subsp. vincentii ATCC 49256
MSILVCGGAGYIGSHVVKYLLEKNEDVVVVDSLITGHVDAVDEKAHLELGDLKDEEFLNRVFEKYQIDGVIDFAAFSLVGESVGEPLKYFENNFYGTLCLLKVMKNHNVNKIVFSSTAATYGEAENMPILETDRTEPTNPYGESKLAVEKMFKWCANAYGLKYTALRYFNVAGAYPSGEIGEAHTCETHLIPLILQVALGQREKISIYGDDYPTPDGTCIRDYIHVMDLADAHYLALNRLRDGGDSQIFNLGNGEGFSVKEVIEVTRKVTGHPIPAEVSPRRAGDPARLIASSKKAIDVLKWKPKYNKLEQLLKLLGTGIKSS

SEQ ID NO: 10263 - protein, 874 aa, Clostridium acetobutylicum
MNRFKIKYLLATLACFVSFSAFTCTSSVKADTTDTTPHVTYDAHVENIGWQDPWSKDGAEIGTDGKGLRVEALKIKLLNAPAGAKISYQAHVQNVGWQDWVSDGTEAGTDGKGLRVEALKIKLENMPGYSIQYQAHVQNIGWQDWVSDGAEAGTDGKGLRVEALRIKIVKNNDTPASSISLSKSTDSLKVGDTDTLSATLSNNANSKNITWTSSDSSIVSVDNNGKITALKEGTANVTASSDGKTASCAVTVAKAATTDTAPSLSYSAHVQNIGWQTPVTDGMEVGTDGKGLRVEAFKLNLLNAPAGAKITYQAHVQNIGWQDWVSNGAEAGTDGKGLRVEALRIKLENMPGYSIEYQAHVQNIGWQNWVNDGEEAGTDGQGLRVEALRIRIVKSVPVDSISLNKQTDTIAVGNSDTLSAAVAPTNSTFVWTSSDSSIASVDASGKVTGIKAGTATITASSLDGKKTASCSVTVADKTVVTFKDPVLEQAVRKEINKTTGQLYNTDVNKITSLGIIKDTVINSLDGIEQLSNLKQLWLNYGNVTDLTPISKLSNLKILSLNGDTDIDISPIGNLTNLNQLDIGESKISNINVLNKLNNLNYLILDKNTSIKDFSPLGSLTNLTLLQASYCNFSDLTPLAKMKNLSRVSLNYNNITSIEPLKSSTNLVDLVLSGNKISDITPVANLTNLESISLSYNQVNNISSLAKLTKLKSLMLDHTGISDISSLSGLTNLNYLGVQDNNIEDITSLKNLTNLANLKISQNKISNVDAIGNLTNLTLLDMNNNQISNINAIKNSTKLISLSMHHNKVSDISALSKLTNLESLNLGNNPINDVTPLKDLSHLYEVDLTTSQANIDYLNSVLRLGHAYNNKNQDN

SEQ ID NO: 10264 - protein, 149 aa, Brassica napus
MADQLTDDQISEFKEAFSLFDKDGDGCITTKELGTVMRSLGQNPTEAELQDMINEVDADGNGTIDFPEFLNLMARKMKDTDSEEELKEAFRVFDKDQNGFISADELRHVMTNLGEKLTDDEVDEMIREADVDGDGQINYEEFVKVMMAK

SEQ ID NO: 10265 - protein, 95 aa, Oxalis tuberosa
  unsure (1)..(95): unsure at all Xaa locations
LYAGINISGTNGEVMPGQWEYQVGPSVGIEAGDHIWASRYILERITEQAGVVLTLDPKPIDGDWNGAGCHTNYSTKSMRDXGGFEVIKXAILNLS

SEQ ID NO: 10266 - protein, 350 aa, Synechococcus sp. PCC 7002
MQSTVRSPGSRESLRQDLPFTLKDVKAAIPDYCFQPSVFRSLAYFFLDIGIIAGLYAIAAYLDSWFFYPIFWFAQGTMFWALFVVGHDCGHGSFSRSKFLNDLIGHLSHTPILVPFHGWRISHRTHHSNTGNIDTDESWYPIPESKYDQMGFAEKLVRFYAPLIAYPIYLFKRSPGRGPGSHFSPKSPLFKPAERNDIILSTAAIIAMVGFLGWFTVQFGLLAFVKFYFVPYVIFVIWLDLVTYLHHTEADIPWYRGDDWYYLKGALSTIDRDYGIFNEIHHNIGTHVAHHIFHTIPHYHLKDATEAIKPLLGDYYRVSHAPIWRSFFRSQKACHYIADQGSHLYYQPKK

SEQ ID NO: 10267 - protein, 500 aa, Lens culinaris
FLHLRPTPTAKSKALRHLPNPPSPKPRLPFIGHLHLLKDKLLHYALIDLSKKHGPLFSLYFGSMPTVVASTPELFKLFLQTHEATSFNTRFQTSAIRRLTYDSSVAMVPFGPYWKFVRKLIMNDLLNATTVNKLRPLRTQQIRKFLRVMAQGAEAQKPLDLTEELLKWTNSTISMMVLGEAEEIRDIAREVLKIFGEYSLTDFIWPLKHLKVGKYEKRIDDILNKFDPVVERVIKKRREIVRRRKNGEVVEGEVSGVFLDTLLEFAEDETMEIKITKDHIKGLVVDFFSAGTDSTAVATEWALAELINNPKVLEKAREEVYSVVGKDRLVDEVDTQNLPYIRAIVKETFRMHPPLPVVKRKCTEECEINGCVTPEGALILFNVWQVGRDPKYWDRPSEFRPERFLETGAEGEARPLDLRGRHFQLLPFGSGRRMCPGVNLATSGMATLLASLIQCFDLQVLGPQGQILKGGDAKVSMEERAGLTVPRAHSLVCVPLARIG

SEQ ID NO: 10268 - protein, 468 aa, Pseudomonas putida KT2440
MTDSVEKIQLTRALKSRHIFMLSLGGVIGTGLFMGSGVTINQGGPVGAILAYLVAGLLMYLVMVCLGELSVQMPVSGSFQAHATKYIGPATGFMIGWVYWMSWATTVGLEFTAAGMLMTRWFPEVPIWYWSALFVVVLFGLNALATRAFGEAEYWFSGIKVATILGFIVIGLLVIFGAIPLSSGAPAPMLNNLVGESLFPHGLSAVFAVMMTVVYAFQGCEIMGVAAGETEHPEKSIPRAVRNVVFRVLIFYVLAIAVLSAIVPHEQAGLMESPFVQVFDMVGIPYAADLMNFVILTAILSVGNSGLYASTRILWAMSKTGMAPKSLSPLSKRGVPLRALSITLCFALISLMTSFVAADTLFMVLMAVSGMSGTVTWIVIALAQYRFRKAWLRDGGQLQDLKYKAPLYPLVPLLCITLCSSLFVFLALDETQRPSLYWGFGFIALCYAAYFFVNRRRQGAFAPSTPGV

SEQ ID NO: 10269 - protein, 1137 aa, Oryza sativa; identical to SEQ ID NO: 5139

SEQ ID NO: 10270 - protein, 368 aa, Ralstonia solanacearum
MKTKAAIAWKSGAPLTIEDVDLQGPRAGEVLVEIKATGICHTDYYTLSGADPEGIFPAILGHEGAGVVLDVGAGVTSLKAGDHVIPLYTPECRQCKFCLSRKTNLCQAIRATQGKGLMPDGTSRFSIDGKPIFHYMGTSTFANHIVVPEIALAKIRPDAPFDKVCYIGCGVTTGVGAVVYTAKVEAGANVVVFGLGGIGLNVIQGAKMVGADKIIGVDLNPAREAMARKFGMTHFVNPKEVGNVVDHIIQLTDGGADYSFECIGNTQVMRQALECCHKGWGKSIIIGVAEAGAEISTRPFQLVTGREWKGSAFGGARGRTDVPKIVDWYMEGKLNIDDLITHTLPLERINEGFDLMKRGESIRSVVLY

SEQ ID NO: 10271 - protein, 209 aa, Gossypium davidsonii
VYYWECKGYTPLFPRILGHEASGIVESVGEGVNDLKPGDHVLPIFTGECKECRHCLSEESNNMCELLRINCDRGVMLADGKTRFSINGKPIYHFVGTSTFSQYTVVHVGQVAKISPTAPLDKVCPISCGICTGFGATVNVAKPKKGQTVAVFGLGAVGLAAAEGARVCGASRIIAVDVNPRRFEEAKRFGITEFVNPKDYDKPVQEVIV

SEQ ID NO: 10272 - protein, 167 aa, Zea mays
  unsure (1)..(167): unsure at all Xaa locations
ARNSAREKDEQQQSRGIALMQGICAVVYRKADNTPCPIXAAFNKDALKSLNITHILIVAKSLDPVFPAEFNYKKIEVLDIPDTDLLKHSDECFGFIDEAISSGGNVLVHCFAGRSRXKHQMSLESALSLVRSKRPQVAPNGGFISQLEKFQKSLQVEQEWRMQPVQH

SEQ ID NO: 10273 - protein, 856 aa, Brassica rapa
MKCVRNIYYQSYTFSFVLAFVVLILFHPAISMHFNTLLSTESLTISGNRTLVSPGHVFELGFFKNTLNSRWYLGIWYKNLSDRTYVWVANRDSSLSNAIGTLKFSGSNLVLRGRSNKFVWSTNLTRGNERSPVVAELLANGNFVIRYSYNNDASGFLWQSFDFPTDTLLPEMKLGYYLKTGLNRFLTSWRNFDDPSSGEFSYKLETRRLPEFYLLKNGSPGQRSGPWNGVQFSGIPEDQTLSYMVYNFTENSEEVAYTFRMTDNSIYSRIQLSPEGLLERLTWTPTSGTWNLFWSAPVDIQCDVYMTCGPYAYCDVNTSPVCNCIQGFMPFDMQQWALRDGTGGCIRRTRLSCSSDGFTRMKNMKLPDTKMAIVDRSIDVKECEKRCLSDCNCTAFANADIRNGGTGCVTWTGELEDIRNYIGNGQDLYVRLAAADLVKKRKANGKIISLIVGVSVLLLLIMFCLWKRKKNRAKASATSIDNQQRNQNVLMNGMTQSNKRQLSRENKTEEFELPLIELEAVVKATENFSNCNELGQGGFGIVYKGMLDGQEVAVKRLSKTSLQGIDEFMNEVRLIARLQHINLVRILGCCIEADEKILIYEYLENSSLDYFLFGKKRSSNLNWKDRFAITNGVARGLLYLHQDSRFRIIHRDLKPGNILLDKYMIPKISDFGMARIFARDEIQARTDNAVGTYGYMSPEYAMDGVISEKTDVFSFGVIVLEIVSGKRNRGFYQVNPENNLPSYVWTHWAEGRALEIVDPVILDSLSSLPSTFKPKEVLKCIQIGLLCIQERAEHRPTMSSVVWMLGSEATEIPQPKPPVYCLIASYYANNPSSSRQFDDDESWTVNKYTCSVIDAR

SEQ ID NO: 10274 - protein, 114 aa, Zea mays
MATKVICFLVLASLLLAVAFPVSALRQQVKKGGGGGGGGGGSVSGSGGGNLNPWECSPKCGSRCSKTQYRKACLTLCNKCCAKCLCVPPGFYGNKGACPCYNNWKTKEGGPKCP

SEQ ID NO: 10275 - protein, 523 aa, Yarrowia lipolytica
MSNALNLSLALGVFLLAYYGFSVIQYRIKTRKLEKKWKCGKPKDISRFPFSASFFIPFLVESKKNRLLEFVQWMFESQVYPGYTCKTTVFGVDMYHTVDPENLKAVLATQFKDFCLGERHAQFLPVLGNGIFTLDGQGWQHSRAMLRPQFARDQVSDVEMIEEHIQYMTSRIPKDGSAFDAQELFFNLTLDTATEFLFGQSVGSQTVETNPTAVPTDMPVHLRKSFQEDFNTAQEHLGQRARLQMFYWAWRPRELYSSGERVHAFVDHYVKKALEESEKHVDDGKYVFLRELAKETKDPIVLRDQALNILLAGRDTTASLLSWCLYLMARRPEVYAKLREEVIENLGDGEDLSTITFESLKRCDYLRYVLNEVLRLYPSVPANMRYATRDTTLPRGGGPDGMQPIVVRKGNLVSYHVFTTHRLKEFWGEDAEEFRPERWYEDGASQAKGWEYLPFNGGPRICLGQQYALTEAGYALARIAQLYDTIENADDKPEPPVKFHALTMCHHTGVLVKLYNSKTTKAQ

SEQ ID NO: 10276 - protein, 226 aa, Petroselinum crispum
TSKSMATVKLLGFWASPFVNRVQIALNIKSISYELIEENLRAKSQLLLESNPVHKKVPVLIHGDKPISESLVIVEYIDEAWTHGPSILPSDPFARATARFWAAYITDKWWPLLTEYRTAEGEEAKAAAKEKFLEGLVLLEEAFVKSSQGKGYFGGDNIGYLDVVLGSLLAWLRVREVTQGVAFLDKAKAPELAAWADRFTSNPAVVDVLPKTEKVVDFLNSFNRAN

SEQ ID NO: 10277 - protein, 393 aa, Halobacterium sp. NRC-1
MLSIALAGKPNAGKSTFYTAATRSEVDVANYPFTTIDANRGVTHVRTACPCLTREERCGHEHCHDGKRYVPVELLDVAGLVPGAHEGRGLGNQFLDELSNADVIVNVVDASGATNEEGEPVEIGDHDPVEDIDFVEEEMDLWLAGIVEDNWESVERASRSPGFDIETAITEMMTGFGASEYQVAAVLREFDYPDDPIQWSGEDREALARGVRERTKPIVVVANKVDVAPEENVQRLLDLDKPVIPATAQGELAVRRGADAGFLDYDPGDEDFDITGDVGDDQREALEALRETMQEYGGTGMQRALDYAVYDLLEMVTAFPVQDQSKWTDATGTVLPDAVLLDAGSTPVDLAYAVHSDIGDGYLHAVNAKTNREIGEDDELGEGDVVKIVSTAN

SEQ ID NO: 10278 - protein, 173 aa, Oryza sativa
MAGVGRTMIAPLLVLNLIMYLIVIGFASWNLNHYISGETNHPGVAGNGATFYFLVFAILAGVVGAASKLAGVHHVRSWGAHSLAAGAASALIAWAITALAFGLACKEIHIGGYRGWRLRVLEAFVIILAFTQLLYVAMLHGGLFSGNHAAGAGGYGGDYPADHHHKPAAAARV

SEQ ID NO: 10279 - protein, 95 aa, Oxalis paucartambensis
LYAGINISGTNGEVMPGQWEYQVGPSVGIEAGDHIWASRYILERITEQAGVVLTLDPKPIDGDWNGAGCHTNYSTKSMRDEGGFEVIKKAIFNLS

SEQ ID NO: 10280 - protein, 213 aa, Zea mays
  unsure (1)..(213): unsure at all Xaa locations
MEMESSELTRCFATAEARDKICRAIQYGSKFISNGEPGPAQNVDKSTSLARKVFRLCKFVNDLHALISPPAKGTPLPLILLGKSKXNAMLSTFLFLDQIVWAXRTGIYKNKEXLSVSSADSIYCFRXLIMLQAIIELAELQRLSTSMKKLEKELKHQELYKNEQYRMKLHKSNERLLAPTKSSLDILATLRQIPISAKAPAFGFAPPRRVDSI

SEQ ID NO: 10281 - protein, 272 aa, Spinacia oleracea
MKLDTSGLESTAPIFRRSDFVFDGLQMTPSFDLPNPTDFDGFQKEAVQMVKPAKGTTTLAFIFKHGVMVAADSRASMGGYISSQSVKKIIEINPYMLGTMAGGAADCQFWHRNLGIKCRLHELANKRRISVTGASKLLANILYNYRGMGLSVGTMIAGWDETGPGLYYVDSEGGRLKGMRFSVGSGSPYAYGVLDNGYKYDMTVEEASELARRAIYHATYRDGASGGVVSVYHVGPDGWKKVTGDDVGDLHFQYYPVVPATVEQEMVEVVGA

SEQ ID NO: 10282 - protein, 151 aa, Zea mays; identical to SEQ ID NO: 743

SEQ ID NO: 10283 - protein, 162 aa, Daucus carota
MAKLYVVLVLSLVLVHAMAARDIPTEKHDTETVVVATTTNGGGKAVKDKKCAVGFVGVGGAVGGVAGVVPLGGIGGVGGAGGVGGAGGLGGAGGLGGLGGLGGASGLGGLGGASGLGGLGGASGLGGLGGAGAGGLGGLGGVGGGVGGGAGGAGGVGGGVLP

SEQ ID NO: 10284 - protein, 325 aa, Bifidobacterium longum NCC2705
MKYRSVGKSGLKISEVALGSWVTDLKGTAAEDVAKETVKLAYDSGVNFFDCADAYSGGAAERFLGKTLKQYPRKELVISSKVYFPTGEGVNDRGLSRKHIFESIDQTLKNMQTDYLDMYFCHRFDETTDLTETLRAMSDLVAQGKVLYYGVSEEWGSARLEEAQRIIDRYNLYPITVVQPQYNLNDRYIEHEIMGTCRKLGIGITTFSPLAQGLLTGKYRKGQPLPAGSRATWQSDHQINDLLTDENLDKVEQLRKVADELGTNLPVLSMAWILQHPEISCVIAGASKPSQLENNMKAAGFVIPADAMAEIDKITGFHRFERHVG

SEQ ID NO: 10285 - protein, 483 aa, Lactobacillus plantarum WCFS1
MAEKQHQEVHRSLQTRHLSMIALGGSIGTGLFVASGSAISTAGPGGALLAYVGIGVMVYFLMTSLGEMATYLPVSGSFSTYATKFVDPALGFAMGWNYWFNWAITLAVDISTAAIVMQFWLPSVPGWVFSLIALVLIFTINALSVRSFGETEYWLSLIKVVTVLVFLVIGVLTIVGIMGGHATGLSNFTYKKAPFVGGIPTILSVFVVAGFSFQGTELIGITAGESATPEKSIPAAIKQVFWRILLFYILAIFVIAAIIPYTSKDLLGSSASDIAISPFTLVFKRAGLAAAASVMNAVILTSVLSAANSGMYASTRMLYSLSLQGYAPKTFGRVNRRGIPIMALLGTTVIGLLTFLSSLFGERIYIFLVSASGLTGFIAWLGIAISHLRFRRAFVKQGHQLSELRYHAKWFPFGPWFAFILCVVVIIGQDLHSFATLDWQAIGVTYMSIPLFIILYVYYKIRYHTKMIPLDKVDLTRKRHHQD

SEQ ID NO: 10286 - protein, 282 aa, Saccharomyces cerevisiae
MDPSLVLEQTIQDVSNLPSEFRYLLEEIGSNDLKLIEEKKKYEQKESQIHKFIRQQGSIPKHPQEDGLDKEIKESLLKCQSLQREKCVLANTALFLIARHLNKLEKNIALLEEDGVLAPVEEDGDMDSAAEASRESSVVSNSSVKKRRAASSSGSVPPTLKKKKTSRTSKLQNEIDVSSREKSVTPVSPSIEKKIARTKEFKNSRNGKGQNGSPENEEEDKTLYCFCQRVSFGEMVACDGPNCKYEWFHYDCVNLKEPPKGTWYCPECKIEMEKNKLKRKRN

SEQ ID NO: 10287 - protein, 427 aa, Coxiella burnetii
MTELTGVSIVTYQHIKVPSQGEKITVNKAVLEVPDRPIIPFIEGDGIGIDITPVMKNVVDAAVEKSYAGKRKIEWMEIYAGEKATKVYGKDNWLPDETLEAIKEYQVAIKGPLTTPVGGGIRSLNVALRQQLDLYVCLRPVRYFTGVPSPVKTPEKVNMVIFRENSEDIYAGIEWPAGSPEAVKLINFLQNEMGVKKIRFPETAGIGIKPVSKEGTSRLVRRAIQYAIDNDRDSVTLVHKGNIMKFTEGAFKDWGYEVAVKEFGAKPLDGGPWHVFENPKTGQKITIKDVIADAFLQQILLRPAEYSVIATLNLNGDYISDALAAEVGGIGIAPGANLSDTVGLFEATHGTAPKYAGQDKVNPGSLILSAEMMLRYLGWKEAADLVVQGIEGAIESKTVTYDFARLMTGAKEVSTSQFGKAIIKHIL

SEQ ID NO: 10288 - protein, 73 aa, SINNINGIA INSULARIS
  unsure (1)..(73): unsure at all Xaa locations
ISGTNGEVMPGQXEFQVGPSVGIEAGDHIWCARYLLERITEQAGVVLSLDPKPIEGDWNGAGCHTNYSTKSMR

SEQ ID NO: 10289 - protein, 293 aa, Zea mays subsp. mays
IIESVGEGVTDVAPGDHVLPVFTGECKECAHCKSAESNMCDLLRINTDRGVMIADGKSRFSINGKPIYHFVGTSTFSEYTVMHVGCVAKINPQAPLDKVCVLSCGISTGLGASINVAKPPKGSTVAVFGLGAVGLAAAEGARIAGASRIIGVDLNPSRFEEARKFGCTEFVNPKDHNKPVQEVLAEMTNGGVDRSVECTGNINAMIQAFECVHDGWGVAVLVGVPHKDAEFKTHPMNFLNERTLKGTFFSNYKPRTDLPNVVELYMKKELEVEKFITHSVPFAEINKAFDLMA

SEQ ID NO: 10290 - protein, 189 aa, Streptomyces avermitilis MA-4680
MEPATLTTDRLVLRTVGTQDTDAVYEAAQDPEIQRWTTIPSPYLPEHAASFTDQLVPEGWANGSMFTFGVFLPSGELAGMLALSMRALGVSEVGFWATKEHRGNGYITEAVLAASHWAFTRMSIDRVEWRAQVGNTGSRAVAERAGFTIEGTLRSAINNKGVRRDCWVGSLLPSDLGLPSTAPYLPTPR

SEQ ID NO: 10291 - protein, 194 aa, Glycine max
MSLMSSVQRKGGSFSYSEAELNEQLQAWRENPSWVDKPPLIKVTAPKGSLCNLDVEVDVGLPPDAVYNIVIDPDNRRVFKNIKEVVSRKVLVDEGHRQVVDLDQAAIWKFLWWSGTISINVLVDQNRKDHSMKFKQTKAGFMKKFEGCWRVEPLFVDEAMCHPFKPVTQDDYNACARGKGGIGSKVSLKQTLSH

SEQ ID NO: 10292 - protein, 273 aa, Oryza sativa
  unsure (1)..(273): unsure at all Xaa locations
XWASSSRSRHRRRCRRHRGSGRRRGGPPSSTSRSGPSASRSCRSRRRRHRPRSRGGPRGGTPPASTPATRGRHPAAAARRSSASSWASPTDRXKGEKTRKATDGSEEPSDSGPTTPLPDKKLLVFVLDRLQKKDTYGVFSDPVDPEELPDYHDIIKHPMDFSTIRKKLNKGAYGNLEQFEDDVFLLTSNAMCYNSPDTIYYRQARAIQELAKKDFENLRQDSDASEPEPEPEIKPDPEPTRRGRPPNKNTIRSNIFPSAAQMVANRMQTHTAX

SEQ ID NO: 10293 - protein, 302 aa, Oryza sativa (japonica cultivar-group)
MPPLNPRVVGCGERTLVLSHGYGGSQAIWDRVLPHLAETNKVVLFDWDFSGGGGDGEKAAAEEEEEYTFEGFADELVALMEEMGVSGAVYVGHSMAGMIGCIASINRPGLFTHLVLVGASPRYINSDDYEGGFDEPEIDAMLATISSDFLSWAKGFVPLIVGAAADNPSAAETLARTFFAMDPRVADALARMIFLGDNRGVLGRVAAPCTLVHASGDPAAPPCVGRYMEGRIGRAALVTVDSAGHFPQLVAPDEMLRILDAVLAEEEEAAAKGGGVAIVMEERGSLAAVGEVEVKGDIDVAT

SEQ ID NO: 10294 - protein, 466 aa, Clostridium acetobutylicum
MEIFRKKTAEDFQDEASSSNLKRGLTSFDLAAIGIGAVVGTGIFVSTGQGAKLAGPSVVISFLVAAVTCGLCSLTYCELSSMFSVSGSTYSYSYIAFGEIIAWIIGWDLMLEYLVAASAISSGWSSTLIGIVKNYGVNVPDALTKSPLSGGIVDLPAIFITLVITFLLYRGVTESAKINNVIVGVKICIIALFVFLGITHVKVTNYHPFVPYGVNGIMSAAAIIFFSFIGFDAIATTAEETKDPKKDVPKGLLICFGVVVVLYMSVAIILTGIVPYTKIDINNALPGALSSIGITWGSALVGVGAVLGMISTLLVIMYGQIRIFMVMSRDGLLPKVFSSVNKKHSTPGLCTVITGVLVSIIAGFLPLKMIMELCNIGTLFAFILVSFGVIVLRYTMPNVERKFKCPGVPFTPLVTAFFCFYMMIHLPLFTWLRFGAWLLIGFVIYFVYGSKHSKMTARDRGKEEVS

SEQ ID NO: 10295 - protein, 130 aa, Glycine max
MALEWVVLGYAAAAEAIMVILLTIPGLDALRKGLVAVTRNLLKPFLSVVPFCLFLLMDIYWKYETRPSCEADSCTPSEHLRHQKSIMKSQRNALLIAAALLFYWLLYSVTNLVVRIDNLNQRLQRFKNRD

SEQ ID NO: 10296 - protein, 142 aa, Glycine max
MSGVGPLSQDWEPVVLRKKAPTAAAKKDEKAVNAARRSGAEIETLKKYNAGTNKAASSSTSLNTKRLDDDTENLAHEKVPTELKKAIMQARMDKKLTQAQLAQLINEKPQVIQEYESGKAIPNQQIIGKLERALGAKLRGKK

SEQ ID NO: 10297 - protein, 344 aa, Thermus thermophilus
MVPAPETIRQALQERLIARLDHTDPLYRDLLQDYPRRGGKMLRGLLTVYSALAHGAPLEAGLETATALELFQNWVLVHDDIEDGSEERRGRPALHRLHPMPLALNAGDAMHAEMWGLLAEGLARGLFPPEVLLEFHEVVRRTAYGQHLDLLWTLGGTFDLRPEDYFRMVAHKAVYYTAVVPLRLGVLLVGKTPPAAYEEGGLRLGTAFQIVDDVLNLEGGEAYGKERTGDLYEGKRTLILLRFLEETPPEERAREAKPEAEVGWLLERLLASRALAWDKAEAKRLQAEGLALLEAAFQDLPGRRPGPPPRSPRRFGGAQGIMGPCRGCASGSSPPTTPTSSKSA

SEQ ID NO: 10298 - protein, 276 aa, Glycine max
MSQNNAFEELRKAETMITAEQPSPVSVLDAAFYKDDPPSPVKNKSDISKNLGEALSTDEDSEESSVDLLQEIDWIDEKLFNFNNNRDPDHKYIAKILLASGLLSGRSYSQIFHSPGHLINPKLFFALEQMKTKRPLNIEGSAKKIPRNINPEQMQRKLIFDVVNDILVQKLILDSSSALWCQPNELAGTTLKGKQLLDELCTEIDQLQPQNRNVSLVHEEENLKHHQAIWTNCCNEMPNIVLDVERLIFKDLITEVVRGEVANHPGTHCRQLVFYK

SEQ ID NO: 10299 - protein, 473 aa, Brassica napus
MSATLTGSGTALGFSCSSKIPKRVSPSSSNRCSIKMSVSVDEKKKSFTLQKSEEAFNAAKDLMPGGVNSPVRAFKSVGGQPVLIDSVKGSKMWDIDGNEYIDYVGSWGPAIIGHADDEVLAALAETMKKGTSFGAPCLLENVLAEMVISAVPSIEMVRFVNSGTEACMGVLRLARAFTNKEKFIKFEGCYHGHANAFLVKAGSGVATLGLPDSPGVPKAATSDTLTAPYNDIEAVAKLFEAHKGEISAVILEPVVGNSGFITPTLEFINGLRQLSRDNGALLIFDEVMTGFRLAYGGAQEYFGITPDLTTLGKIIGGGLPVGAYGGRRDIMEMVAPAGPMYQAGTLSGNPLAMTAGIHTLKRLKQPGTYEYLDKITKELTNGILEAGKKTGHAMCGGYISGMFGFFFTEGPVYNFADAKKSDTEKFGRFFRGMLEEGVYFAPSQFEAGFTSLAHTTEDVQFTIAAAERVLGRI

SEQ ID NO: 10300 - protein, 392 aa, Aspidopterys elliptica
DLEPVNPADVPVTAAGALKSYKLAAKAISRLQSLPSGNISLLCDVLVKEVRDLTGYDRVMVYKFHEDEHGEVVSECLRSDLESYLGLHYPATDIPQASRFLFMKNKVRMICDCVAPPVKVIQDERLPQPLSLCGSTLRSPHGCHAQYMTNMGIIASLVMSVTVNEDDDMVDGDQPQMARKLWGLVVCHHTSTRFVPFPLRYACEFLIQVFGVQINKEVELAAQVREKHILQIQTMLCDMLLRDAPVAIITQSPNVMDLVKCDGAALYFKNKTWLLGVTPTEEQIRDIAEWLLEYHSGNTGLSTDSLMEAGYPGASALGDAVCGMAAVSITSRDFLLWFRSHTAKEIKWGGAKHDPDDKDDGRKMHPRSSFKAFLEVVKWRSMPWEDIEMDAI

SEQ ID NO: 10301 - protein, 348 aa, Pyrococcus furiosus DSM 3638
MSEKMVAIMKTKPEYGAELVEVDVPKPGPGEVLIKILATSICGTDLHIYEWNEWAQTRIRPPQIMGHEVAGEVVEVGPGVEGIEVGDYVSVETHIVCGKCYACKRGQYHVCQNTKIFGVDTDGVFAEYAVVPAQNVWKNPKNIPPEYATLQEPLGNAVDTVLAGPIAGKSVLITGAGPLGLLGIAVAKASGAYPVIVSEPSEFRRNLAKKVGADYVINPFEEDVVKEVMDITDGNGVDVFLEFSGAPKALEQGLQAVTPAGRVSLLGLFPGKVSIDFNNLIIFKALTVYGITGRHLWETWYTVSRLLQSGKLNIDPIITHKYKGFDKYEEAFELMRAGKTGKVVFMLK

SEQ ID NO: 10302 - protein, 355 aa, Bradyrhizobium japonicum USDA 110
MSEMILVTGGAGYIGSHVCIALLDAGFDVVVVDNLSNSNKASLERVQSICGRSLVFRHADIRNEELIYDMLRTCGVTAVIHLAGLKAVGDSNVRPMMYYENNVLGTMRLLSAMERANVTTLVFSSSATVYGMPQYLPLDEKHPLGPTNPYGRTKLVIEEMLKDLCRSHDGWRIGNLRYFNPVGAHESGLVGEDPLGVPSNLVPFVAQVAIGRREKLRIWGNDYDTPDGTGIRDFIHVVDLASGHLSALRQLRQPGLITVNLGTGNGSSVLDIVRTFESVSGRSIPYEIGERRAGDVAACYADPTVAKDALGWASTRSLEQMCADHWRWQLQNPNGYQGGELPRARERSRHLRRHA

SEQ ID NO: 10303 - protein, 367 aa, Malus x domestica
MGKGGQSCNGVVRDAKPVEQENMAVWLVDVNTIKILPFKLPAIGPNDVRIRIKAVVICGSDVHYLKTMKCADFEVKEPMVIGHECAGIVDTVGSEVKHLVPGDRVGEPGISCARCQQCKGGRYNLCPDMKFFATPPVHGSLANQIVHPADLCFKLPENVSLEEGAMCEPLSVGVHACRRANVGPETSVLIIGAGPIGLVSVLAARAFGAPRIVIVDMDDKRLAMAKSLGADEAVKVSTKMEDLDDRVAEIKKAMISEVDVTFDCVGFNKTMSTGLNATRPGGKVCLVGMGHGVMTVPLTPAAAREVDVVGVFRYQNTWPLCLEFLRSGKIDVKPLITHRFGFTEKEVEEAFATSARGGNAIKVMFKL

SEQ ID NO: 10304 - protein, 441 aa, Glycine max
MLEGPTFLVSRDLPSSCEQETRWIYNSFCVMELASNKRLLELEEEAVLTNPCKLSDAPLSGETKMNFQNLSLSVNQANDQNHSSDQSDSSSLIFQLGRDISINCLLRCSRSDYGSIASLNQSFRSLVRTGELYRLRRQMGIIEHWVYFSCNLPEWEAFDPNTRRWMRLPRMPSNECFICSDKESLAVGTELLVFGKEIMSPVIYRYSILMNAWSSGMIMNIPRCLFGSASLGEIAILAGGCDPRGNILSSAELYNSETGTWELLPNMNKARKMCSGVFIDGKFYVIGGIGVGNSKQLTCGEEFDLQTRKWQKIPNMFPGRNGGTEATEVSSAAEAPPLVAVVNNVLYSADYAQQEVRRYDKDNNLWFTIGRLPDRIVSMNGWGLAFRACGNRLIVIGGPRALDGRVIEINACVPGEGVPEWNLLASRQSGSFVYNCAVMGC

SEQ ID NO: 10305 - protein, 486 aa, Bradyrhizobium japonicum USDA 110
MLPRSAGAGRNKVAVARCPFGQPTGALVMSMQNVAAPALQFTAPRRNELTHIPGDEGWPVIGKTFQVLADPKGHIEANGAKYGPVYRTHVFGETNVVLLGPEANELVMFDQQKLFSSTHGWNKVLGLLFPRGLMLLDFDEHRLHRKALSVAFKSGPMKSYLSDLDRGISARVAQWKAKPGEMQLYPAMKQLTLDLAAASFLGADIGPEVDEINRAFVDMVAAAVAPIRRPLPGTQMARGVAGRKRIVAYFRQQIPLRRGNHGGDDLFSQLCRATHEDGALLSEQDIIDHMSFLMMAAHDTLTSSLTSFIGELAANPDWQDRLRAEVLALGLAPGAPSSFDDLEKMPLSEMAFKEALRIKPPVPSMPRRAMRDFTFKGFRIPAGTAVGVNPLYTHHMKDIWPEPDRFDPLRFTEEAQRNRHRFAWVPFGGGAHMCLGLHFAYMQAKCFARHFLQNIEVSLAPGYKPDWQMWPIPKPRDGLKVRVKAV

SEQ ID NO: 10306 - protein, 328 aa, Zea mays
MQYNNLGRSGLRVSQLSYGAWVTFGNQLDVKEAKSLLQACRDAGVNFFDNAEVYANGRAEEIMGQAIRDLGWRRADVVISTKLFWGGQGPNDKGLSRKHIVEGLKASLKRLDMEYVDVVYCHRPDATTPIEETVRAMNWVIDQGWAFYWGTSEWTAQQITEAWGVANRLDLVGPIVEQPEYNLFSRHKVESEFVPLYSTYGIGLTTWSPLASGVLTGKYSKGNIPAESRFALDNYKNLANRSLVDDTLRKVNGLKPIAAELGVSLAQLSIAWCASNPNVSSVITGATKESQIVENMKALDVIPLLTPEVVDRIEAVVQSKPKRTESYR

SEQ ID NO: 10307 - protein, 383 aa, Glycine max
PLRYKNTNSTLSTLNFFIMNNPTLFLLLVAFSLVFAAVSASSDGGNEEPLIMQVVDGGDVRLGAEHHFLEFKRRFGKAYDSEDEHDYRYKVFKANMRRARRHQSLDPSAAHGVTRFSDLTPSEFRNKVLGLRGVRLPLDANKAPILPTDNLPSDFDWRDHGAVTPVKNQGSCGSCWSFSTTGALEGAHFLSTGELVSLSEQQLVDCDHECDPEEPGSCDSGCNGGLMNSAFEYILKSGGVMREEDYPYSGADSGTCKFDKTKIAASVANFSVVSLDEDQIAANLVKNGPLAVAINAAYMQTYIGGVSCPYVCSRRLNHGVLLVGYGSGAYAPIRMKEKPFWIIKNSWGENWGENGYYKICRGRNICGVDSMVSTVASVHTTTQ

SEQ ID NO: 10308 - protein, 116 aa, Triticum aestivum
MVSFDINDRTKIGLGLTGFGVLFSFLGILMLFDKGFLAMGNILFVSGVSLTIGLKSTVQFFTKPKNHKGSIAFGIGLFLVLIGWPVFGMMAESYGFAVLFSGFWPTAAVYLQKNPT

SEQ ID NO: 10309 - protein, 1796 aa, Neurospora crassa
MSSVKQSAQAATSDVVDTAKNATAETVTAATDFLHTPAVRAALPFINGGLSGMVATTVIQPIDMIKVRIQLAGEGKAGGPKPTPLGVTRDIIASGKAMDLYTGLSAGLLRQAVYTTARIGCFDTFMSRLSARAKEKGQSVGFKERASAGLAAGGLAAMIGNPADLALIRMQSDGLKPVAERKNYKSVIDALGGIARNEGVAALWAGAAPTVVRAMALNFGQLAFFSEAKAQLKARTQWSSKVQTLSASAIAGFFASFFSLPFDFVKTRLQKQTRGPDGKLPYNGMVDCFAKVAKQEGVFRFYRGFGTYYVRIAPHAMVTLLVADYLGWLTKQMFGVLGCVAYPSPIHPDYHAGPASTIAFDNQDELLWIGTQKGFAGSFIGRELKRFTAFRIHPETDGPLRQFLFVDKGVIFLGSRSVYMAARSGVPIWSIRHESMQDLRAMSFTSKGTSEILVAGWQNKMLVIDVNKGEVVKELPTQDQYSFLKMSRYICAATNKGTVNILDPITFTIKKQWQAHGAFINDLDTSNDFIVTCGGSHRQTHNTPAILDPYVKVFDLKNMSAMNPVPFAPLAAHVRMHPRMLTTAIVVNQAGQIHVTDLLNPSNSQVCYTQPQGVVLHFDVSRTGEGKALADNKHNTYVWGSPNKIQFTEIGIPPRLPDPPQPSLLPPDPDMLEELPLSRIGLPYYREQLFSALPPDIISDVGAPPQQIDPNILSTLTKTDWGYIGPNKTGLQRNQYMDTRSTMKTSNTIRAPKFLSEKARESQTGSEDNTLATNETAMMTPNNDHWSLRPEAPPEYRICEIKYSKFGVDDFDFGFFNNTPYPGLENNITNSYANSLLQVMHYTPLLRNMALQHAATACLADPCLLCELGYVFDMLQKGEGPSCHATNMLRALNHTSNASVSGVLEDIAKDKNPSTLVKNLTMFLFDKISQDYKGTPPISTELERTLFKLNQPPNPLDLVKRLLETDARYQIKCMHCQHVSPRTATTFVNKLCYPAAKPNIRGMKAQRITFSQVLKAGLENEAVNKGYCTKCQRYQNLDQRKIIFNIPAVLALCTEITTAEHRKLWSTPGWLPEEIGIIVDQGHVYCYEGDDLKLHLNRGIHNITVYSLVGTVVNVETKSPQKSHLVATVNVGRAEPESKDQDRWHLFNDFSVRGISKVEALTFNAAWKMPVVVMFQVKAANHRFNMDWKTRLDTSVLFRDNNPHALKTYELLDRETEIPGPDTVIAIDTEFIRLKEREIHIDEDGKSKTIRPISHAIARASVVRGQGSREGVAFIDDYIHIKETIVDYLTEWSGITPTDLDPINSQRNLVSPKTAYKKLWVLVNLGCKFLGHGLSQDFRVINIQVPRNQVIDTSIIFMKPPSQRKISLAFLAWYLLKEDIQQNTHDSIEDAQTALKLYRKYEEFMANGSFHDVLEALYKKGKTLNFKPPRISTGAAKDAGFGAVHRVGTPPVPAPGTTEGSFEISNSSTATTGGSALSATGGMGSASASSSMPSTPVRKPIGLGGPFTVAGVVKPSPATSLDNFGAGAVGTGITTAAATMGGGYGGYGTDGAYWGGPNDMAPTSMIGGSAFIPAKFPPGPPETRGFIPYRPQVLLAEREAAAAAAAAAAAAAANNDVGGRGGVACGNGGAGGEQGKQDEESDNDEMRRQQQELFAPEPYAPGFEQNLFEASRRDEGSPVVEYVSPPAVEEDDSSTIKEVSSPVVKEVASPTASLSSPAAVVGEEEEKQKDEDVPPAIEEAAADPSVTTGSSSTLAAEKQRKQEEEEGSSAVGGGGGGEEGKQEKQDDQGSTPALAP

SEQ ID NO: 10310 - protein, 149 aa, Neurospora crassa
MADSLTEEQVSEFKEAFSLFDKDGDGQITTKELGTVMLSLGQNPSESELQDMINEVDADNNGTIDFPEFLTMMARKMKDTDSEEEIREAFKVFDRDNNGFISAAELRHVMTSIGEKLTDDEVDEMIREADQDGDGRIDYNEFVQLMMQK

SEQ ID NO: 10311 - protein, 127 aa, Glycine max
  unsure (1)..(127): unsure at all Xaa locations
MAGSMELPTKGGFSFDLCRRNAMLEKNGLKMPGFRKTGTTIVGLVFADGVVLGADTRATEGPIVADKNCEKIHFMAPNIYCCGAGTAADSEAVTDMVSSQLQLHRYATSRESRVVXXLTLLKTHLFN

SEQ ID NO: 10312 - protein, 329 aa, Triticum aestivum
IGEGHGSQGGENAGGSSCRLQEHSDHGGHQVTLFTRGKAPITQQLPGESDAEYAEFSSKVLHLKGDRKDFDFVKTSLAAKGFNVVYDINGREATEVSPILEALPNLEQFIYCSSAGVYLKSDLLPHFETDAVDPKSRHKGKLETESLLETSGVNWTSIRPVYIYGPLNYNPVEEWFFHRLKAGRPIPIPNAGNQITQLGHVKDLATAFIKVLGNPKASKQVYNISGSKYVTFDGLARACAKAGGFPEPEIIHYNPKDFDFGKKKAFPFRDQHFFASVEKASKDLGVTPEYDLLDGLTDSYNLDFGRGTFRKEADFTTDDMILGKKLVSV

SEQ ID NO: 10313 - protein, 370 aa, Rhodopseudomonas palustris
MDIRAAVFREVGAALRVERIVLDPPQPTEVLVRLAAIGLCRTDYHVMRGERRVAMQPMVLGHEAAGIVEAIGDQVQGVAPGDHVVLTFIPGCGHCRWCQRGLHHLCAEGPRITHGPQLDGSFRRRDAGGRDVGAFCMIGAFAEATVVDQASVLVIDKDIPLDHASLIACGVPAGVGAARHRARVKPGDTVLVVGCGGDGMNVVQGAKLCGASMIIAADIVAQKLEWARDFGATHGTTAQGDELISTVLALTDGIGVDHAFVCINPAETLLPAFRATTKAGNVVVTAITPDTVKQIDVPPLELFATQKAIMGAVYGFASPRLQIPELLGLYRRGDLKLGELISRTYRLDEINQGYADLDAGRNLRGVVLID

SEQ ID NO: 10314 - protein, 744 aa, Listeria monocytogenes
MKTVLGKTNVTDTVSQTDLDQVTTLQADRLGIKSIDGLEYLNNLTQINFSNNQLTDITPLKDLTKLVDILMNNNQIADITPLANLTNLTGLTLFNNQITDIDPLKNLTNLNRLELSSNTISDISALSGLTNLQQLSFGNQVTDLKPLANLTTLERLDISSNKVSDISVLAKLTNLESLIATNNQISDITPLGILTNLDELSLNGNQLKDIGTLASLTNLTDLDLANNQISNLAPLSGLTKLTELKLGANQISNISPLAGLTALTNLELNENQLEDISPISNLKNLTYLTLYFNNISDISPVSSLTKLQRLFFYNNKVSDVSSLANLTNINWLSAGHNQISDLTPLANLTRITQLGLNDQAWTNAPVNYKANVSIPNTVKNVTGALIAPATISDGGSYAEPDITWNLPSYTNEVSYTFSQPVTIGKGTTTFSGTVTQPLKAIFNAKFHVDGKETTKEVEAGNLLTEPAKPVKEGHTFVGWFDAQTGGTKWNFSTDKMPTNDINLYAQFSINSYTATFENDGVTTSQTVDYQGLLQEPTPPTKEGYTFKGWYDAKTGGDKWDFATSKMPAKNITLYAQYSANSYTATFDVDGKSTTQAVDYQGLLKEPKAPTKAGYTFKGWYDEKTDGKKWDFATDKMPANDITLYAQFTKNPVAPPTTGGNTPPTTNNGGNTTPPSANIPGSDTSNTSTGNSASTTSTMNAYDPYNSKEASLPTTGDSDNALYLLLGLLAVGTAMALTKKARASK

SEQ ID NO: 10315 - protein, 376 aa, Apluda mutica
ALSIAGAVQSQKLAVRAISRLQALPGGDVKLLCDTVVEHVRELTGYDRVMVYRFHEDEHGEVVAESRRDNLEPYLGLHYPATDIPQASRFLFRQNRVRMIADCHATPVRVIQDPGLSQPLCLVGSTLRAPHGCHAQYMANMGSIASLVMAVIISSGGDDEQTGRGGISSAMKLWGLVVCHHTSPRCIPFPLRYACEFLMQAFGLQLNMELQLAHQLSEKHILRTQTLLCDMLLRDSPTGIVTQSPSIMDLVKCDGAALYYHGKYYPLGVTPTESQIKDIIEWLTVCLGDSTGLSTDSLADAGYLGAAALGDAVCGMAVAYITPSDYLFWFRSHTAKEIKWGGAKHHPEDKDDGQRMHPRSSFQAFFEVVKSRSLPW

SEQ ID NO: 10316 - protein, 305 aa, Miscanthus condensatus
IESVGEGVTDVAPGDHVLPVFTGECKECAHCRSAESNMCDLLRINTDRGVMIGDGKSRFSINGKPIYHFVGTSTFSEYTVMHVGCVAKINPEAPLDKVCVLSCGISTGLGASINVAKPPKGSTVAIFGLGAVGLAAAEGARIAGASRIIGVDLNPSRFEEARKFGCTEFLNPKDHKKPVQEVLAEMTNGGVDRSVECTGNINAMIQAFECVHDGWGVAVLVGVPHKDAEFKTHPMNFLNERTLKGTFFGNFKPRTDLPNVVELYMKKELEVEKFITHSIPFAEINKAFDLMAKGEGIRCIIRMEN

SEQ ID NO: 10317 - protein, 352 aa, Rhizomucor racemosus
MVAVKLQKEENRQAFLKVFPTLADEVLLELRKYNMPEDAYEWTKKMLYYNVPGGKLNRGISVVDTVRILKGDAVTEDDIFKATVLGWLIEFLQAFFLVSDDIMDASITRRGQPCWYKSEGVGMVAINDAFILESCIYIFLKKYFKKTDYYIELVELFHEVTFQTELGQLCDLITAPEDDVDLSKFSIKKHQFIVIYKTAYYSFYLPVALAMHMVGIKNEEAFKQSHDILIPLGEYFQVQDDYLDCYGAPEVIGKIGTDIMDNKCSWLINQALALANPEQRKILDENYGQKNAESEAKVKQLYLDLNIESVYKAYEEKSFNDLNALIEKLDESVGVKKMIFTEFMDKIYKRTK

SEQ ID NO: 10318 - protein, 191 aa, Lactococcus lactis subsp. lactis
MKEMPKMKITIFGDSITNGFGMDEGGSSNIIARLIEKNEPKLKVVLHGINGDDTYGGLLRLKYVLEEEADLNFIFFGANDASPYHLIRPAEFRENLLKMISQLGVERTVLITPPFYNDDEPTHYSKLSEVELFREVILNLGKEKSLKVIDIFQIMKSSENPKNLLRADGLHFTSRAYELLVREILSVIKNP

SEQ ID NO: 10319 - protein, 248 aa, Bradyrhizobium japonicum USDA 110
MFAGRFQGRTAIVTGAASGIGRGVADRLRAEGAVVSLWDSNEEALLRRTDELGGTDIQVVNIASEQAVDLAMTRSVAALGGRLDILIAGAGISGPNRTTKDYSGDDWRRVIDINLNGTFYCNRAAVREMAQTGYGRIVNIASVAGKEGNPNASAYSASKAAVIGLTKSLGKELASTDVRINCVTPAAIRTPIFDQMAPEHIDFMLSKIPIGRFGRVEEVTALVLWLASDECSFSTGAAFDLSGGRATY

SEQ ID NO: 10320 - protein, 463 aa, Streptococcus pneumoniae TIGR4
MNIFRTKNVSLDKTEMHRHLKLWDLILLGIGAMVGTGVFTITGTAAATLAGPALVISIVISALCVGLSALFFAEFASRVPATGGAYSYLYAILGEFPAWLAGWLTMMEFMTAISGVASGWAAYFKGLLSQYGIAFPQALNGTFNPQAGTFVDLLPILVLVLVTSLVLLNAKAALRFNSILVILKFSALALFVLVGIWNIKFDNWSNFAPYGFGQIYGASTGIMAGASLMFFGFLGFESISMAVDEVKTPQKNIPRGIVLSLSIVTILYALVTLVLTGVVHYSHLNVDDAVAFALRSVGISWAANYVSLVAILTLITVCISMTYALSRMIYSLARDGLVPAAFKELTKTSKIPKNATILTGLASAVAAGMFPLASIAAFLNICTLAYLIMLAYGLIRLRKEKGMPKAGEFKTPLVPLLPILSIIICLSFMLQYNMNTWIAFLVALLVGSIIYFTYGYKHSTIEE

SEQ ID NO: 10321 - protein, 593 aa, Glycine max
MAIATCDHDKNAKALQFIEDMTQNTESVQERVLAEILSQNSQTEYLKRFELNGATDRDTFKSKVPVVSYDDLKHDIHRIANGDRSPILCAHPISEFLTSSGTSAGERKLMPTIRQEMDRRQLIFSLPMPVMNQYVTDMDKGKALIFLFTKAEQKTPSGLVARPVSASMYKSDQFKNRPYDPYNVYTSPDEAILCPDSFQSMYTQMLCGLIMRHQVLRVGANFASGLLRSIHLLQLNWAQLSHDISTGTLNPKITDPAIKQRMTQILKPDPELAEFIVKECSGENWERIIPRIWPNTKYVEVVVTGAMAQYVPTLDYYSGGLPLASNIYGSSECFFGINLNPFCNPSDVSYTIMPNMGYFEFLPQDHDDASSSSGSSFTLSRLIDLDDVELGKSYEIVVTTYSGLCRYRVGDILRVTGFHNTAPQFSFVRRKNVLLSIDSDKTDEAELQNAVEKASVLLKEFKTSVVEYTSFADTKSIPGHYVIYWELLMKDSSNAPTTEALEQCCLTMEESLNAVYRQGRVADHSIGPLEIRVVKNGTFEELMDYAISRGASISQYKVPRCVTFTPITELLDSRVESVHFSPSEPHWTPERRR

SEQ ID NO: 10322 - protein, 147 aa, Zea mays
  unsure (1)..(147): unsure at all Xaa locations
MAKGGLGKLRCMIRRWHSSSRIARAPPAASHGDDDDGAADARRGGGGGASSFHGADEVPKGLHPVYVGKSRRRYLIAEELVGHPLFRTLVDRSGGGAAAGTVVVGXKVVLFEHLLWMLENADPPPESLDELVGLQRVLVKRCSSKPR

SEQ ID NO: 10323 - protein, 190 aa, Zea mays
  unsure (1)..(190): unsure at all Xaa locations
MMRETARLWTAAENKQFERALAGLDLCRPDWEKVARAIPGRTVREVVSHFKSLQVDVQQIESGLVPMPVYGAGAGSFTLQWDGCYGPADSRHNGGXRHHGRTPEQDRKKGVPWTEEEHRLFLLGLKKYGKGDWRNISRNYVQTRTPTQVASHAQKYFIRLNSGGKDKRRSSIHDITTVNLTDDERAPSPS

SEQ ID NO: 10324 - protein, 479 aa, Escherichia coli O157:H7
MISGRHDRKPYYAGEAAIMAINSPLNIAAQPGKTRLRKSLKLWQVVMMGLAYLTPMTVFDTFGIVSGISDGHVPASYLLALAGVLFTAISYGKLVRQFPEAGSAYTYAQKSINPHVGFMVGWSSLLDYLFLPMINVLLAKIYLSALFPEVPPWVWVVTFVAILTAANLKSVNLVANFNTLFVLVQISIMVVFIFLVVQGLHKGEGVGTVWSLQPFISENAHLIPIITGATIVCFSFLGFDAVTTLSEETPDAARVIPKAIFLTAVYGGVIFIAASFFMQLFFPDISRFKDPDAALPEIALYVGGKLFQSIFLCTTFVNTLASGLASHASVSRLLYVMGRDNVFPERVFGYVHPKWRTPALNVIMVGIVAMSALFFDLVTATALINFGALVAFTFVNLSVFNHFWRRKGMNKSWKDHFHYLLMPLVGALTVGVLWVNLESTSLTLGLVWASLGGAYLWYLIRRYRKVPLYEGDRTPVSET

SEQ ID NO: 10325 - protein, 394 aa, Zea mays subsp. mays
LGAERRARLPLGEMGWPLVGGMWAFLRAFKSGKPDAFIASFVRRFGRTGVYRSFMFSSPTVLVTTAEGCKQVLMDDDAFVTGWPKATVALVGPRSFVAMPYDEHRRIRKLTAAPINGFDALTGYLPFIDRTVTSSLRAWADHGGSVEFLTELRRMTFKIIVQIFLGGADQATTRALERSYTELNYGMRAMAINLPGFAYRGALRARRRLVAVLQGVLDERRAARAKGVSGGGVDMMDRLIEAQDERGRRLDDDEIIDVLVMYLNAGHESSGHITMWATVFLQENPDMFARAKAEQEAIMRSIPSSQQGLTLRDFRKMEYLSQVIDETLRLVNISFVSFRQATRDVFVNGYLIPKGWKVQLWYRSVHMDPHVYPDPTKFDPSRWEGHSPRAGTFL

SEQ ID NO: 10326 - protein, 444 aa, Oryza sativa (japonica cultivar-group); identical to SEQ ID NO: 768

SEQ ID NO: 10327 - protein, 367 aa, Dendrobium sp. XMW-2002-1
  unsure (1)..(367): unsure at all Xaa locations
MGRSPCCDKVGLKKGPWTPEEDQKLLAYIEKHGHGSWRALPNKAGLQRCGKSCRLRWTNYLRPDIKRGKFSMQEEQTIIQLHALLGNRWSAIATHLPKRTDNEIKNYWNTHLKKRLAKMGIDPITHKPKSDNLSSADGHSKCTANLNHMAQWESARLEAEARLVRESKLRSSSISXNTTTIFTSKNQPLLPPAVPMTPAASPCLDVLSAWQGAWTKPAANNSQGRGYTIDLESPTSTLSFSDNMMAPTISGMGLAEDSTREDQEWKCLRKTGFSMHTAAPFVSTEASSWLSESSGGDFAAGFTGMLSDKANEQNSEDGCNDSDNAECGSCVDVEESEGEEDENKNYWSSILNLVNSSSPPNSPPPVF

SEQ ID NO: 10328 - protein, 197 aa, Zizaniopsis villanensis
GQTPVFPRILGHEAGGIVESVGEGVTELAPGDHVLPVFTGECRECAHCKSEESNMCDLLRINVDRGVMIGDGKSRFTINGKPIFHFVGTSTFSEYTVIHVGCLAKINPEAPLDKVCILSCGISTGLGATLNVAKPKKGSTVAIFGLGAVGLAAMEGARLSGASRIIGVDLNPAKYGQAKKFGCTDFVNPKDHKKPVQ

SEQ ID NO: 10329 - protein, 82 aa, Zea mays
RGCPAQQQSEYPDKAVLEYVLRTVGTFPPIVVASEARTLEERLAEAAVGWAIIVYRCDCAESFNEFNANNITETFRVLLEMS

SEQ ID NO: 10330 - protein, 485 aa, Neurospora crassa
MGLRPPKIRDSGLFGIKFIKTNVKMAAEHKNLQFWQQMFRSIGGYTGEVRLVGHRIIFTSEPENMKAILATQFEDYGKGEGFHQEWKDFLGDSIFTTDGDLWHASRQLIRPQFIKNRVSDLQCFENHMQMLFRTIANGGALNGEDQMVDMEAGNGKPVDISDLFFRYTLDAATDFLLGKDIKSLSTPVQPFADAFQEVQRVQIVIARAGPLNRFVPKKTFWEGLKVIDETINFYIDRALRLDEEELASKSKGDEGYTFLHALAGFTKNRQVLHDQLMAVLLAGRDTTACTLSWAIYELARHPEAVAKLRAEILSVVGPDRAPTYDDLKSMKYLQNVMNETLRLVRMALKDTTLPRGGGPDGSQPIVILKDTPVGYSPLAMQRRPDLYPPVSEKFPDVEMFSPDRWFHWQPKPWQYIPFNGGPRICIGQQFALTEMGYVLTRLFQRYDRVVSYMDEIDGGKPRMKTDIVLMPGDGVKVAFFEAKRE

SEQ ID NO: 10331 - protein, 2145 aa, Podospora anserina
MPRNDASSRFSSMTGSSTDSARSNITVKPLPSLPPSASSSSPFAASSNQTSNASRSASHGSRRAAPSRLKTDENGQLSRSFKDSDAQVSPTSTSPCVSPSSITSSNSIREHRMSDLADYRRDLAILDPAGGRASRTQQNNPSSGSLSQIAPWMAAAPTPASSGPLPTSFFNDSTDNLSLSSQTSPGLRNATARPSQTTTGSTESPETLYFTDERRPSIASITTTASSQGSRASGARGGIRKLQGFFGEEFPGRDSSEISLSHPIVGKEHRSHSYSHARPHRDRNYSNATDHGRDASPASRPRTPVPKPEVVPFLYQEADDIARYGEAPVRDILSGPDRERFVNDSSQQNNPPKTSGSGRSGHSIGVHLTGHHHRHNKSNEDPRSLRPTVSREDSTISVPKDRNGSSTMYGTRSRAQSPAPSTTGSYWGHKSGSTDGQTSPGQPKKSFLGRLGRRLKEKDDAPDLKKLGPASQSSLHSRPSRQELSKADGQFARGADGKYQPDVRDGIRPDLARPANGPQTFNKFSLSKKAPRSKTQDDLDEAIGPTDRQDVGTVFHLDTNLNNMDGILSKPAPLTPMNAHEIFDEVGSGKGSISYPSSNGAWNAPDSWAVLRDDDAGAQLPDTEDIGSPPRPEEKQHNYCIRVFRADGTFATLQMPLLTSVSELINQIVKKSYLQDPDKFKLVLKKHDLYKVLQSTDRPLLLQKRLLEQVGFEERDRIEDIGREDNSYLCRFLFYPFTDNSYEVMDQMEFLRSQKNNHIDLSGRSLSAIPVQLYPRANEIISLNLSRNLSLQVPRDFISVCPNLRDIKFNNNEARALPKSFGYASRLTMLDASNNRLESLESAALHNLTGLLKLNLANNKLKQLPREFEAFAVLRTLNISSNLLNNFPPFLAKLENLVDLDLSFNTIQSLPDNVGQMTSLERLVITNNELSGSLPPSFKNLRSLRELDIKYNAISNIDVISQLPKLEILSATRNNISQFSGTFERVRSIKLNWNPITKFEIKAPVPTLKALNLSNAQLASIDESFHNMSNLERLELDKNYFVSLPAHIGNLRRLEYFSIAHNSVGELPPEIGCLTELKRLDVRGNNIRKLPMELWWANKLDYLNASSNVLENFPKPASRAPHPPGETNGNTSFPTGRIGPPTGALSQTPSAEELNDPSRRPSQASSSLLSVGPSPVPGGADRKSSMVSVYGKGGRKTSVISRSTTQSSTALATPTASSRKDSSHTQRLTNTFAGSLRYLYMADNQLDDDCFDQLCMLENLRVLNLSYNDLSDMPQRSIKSWPQLVELYLSGNELASLPADDLEEYSMLQTLHINGNKFTNLPADISRAKKLTVFDCGSNSLKYNIANVPYDWNWNLNPNLRYLNLSGNRRLEIKQSSVPTAAQNREQYTDFGRLTNLRVLGLMDVTVLNSTLPDQSEDRRVRTSGSLAGYMPYGMADTLGSKNEHLSTIDLVVPRFNSNDSETLLGLFDGQALSSGGSKIAKYLQENFGHIFSQELRDLKNTENPADALRRSFLSLNKDLIAAGNTHTEDRSLMVHRGSTAPLVLSREDMNSGGVATIVYIQNQDLYVANVGDVQAMIIKSDSTHVMLTKKHDPADPNERTRIREAGGWVSRNGRLNDLLEVSRAFGYLDLMPAVQSAPNIEKHTIGEHDEMILIATREVWEYLPKDVLVDVTRSVRQDPDPMRAAQKVRDLAMAYGCSNKMTVQMLGVSNLKARRERSRQHKGQSMPVYASLQDDGGSSTGMRRARKARDGPLDSTLGRLDAEVPAPTGLIAIVFTDIKNSTQLWETYPEAMRTAIKNHNELMRRQLRTIGGFEVKTEGDAFMVSFPTATSALLWCFAVQCKLLHLDWPAELYNSVNCQPVYDRDNNLIFKGLSVRMGIHWGEPLSEPDPVTRRMDYYGPMVNKASRISACADGGQIAVSSDFIAEIQRCLEHYQEPTSTAVDLNEDSFATAIRSELRSLSGQGFEVKDMGEKKLKGLENPEFIYSLYPHALSGRIETHSKHEKEQAQDLREIRPAILSPGSELSVEPDDIWSLWRVALRLEMLCSMLEDNSKALQPPETGLLDRMRQRGGEVSEDFLVNFLDHQVSRIETCINTIYMRHLVSQSSIGSNFGALRGPMDEVLKVVAEQFQLVAEYKARYGDLRA

SEQ ID NO: 10332 - protein, 372 aa, Triticum aestivum
MDAAAAAGVLAALAPSWSAAVVLASYLAYLAAAGALLPGKLVAGAVLPDSSRLHYRCNGLLSLLLLLGLSALGVYTGWMTPTVVADRGLELLSTTFTFSVIVSFLLYYTGLRSRHQSSSLKPHATGSFIEDWWFGVQLNPHFMGVDLKFFFIRAGMMAWLFINLSLLAKSYLAGSVNRAVILYPFFCGWYIIDYFIHEEFMTSTWDIIAERLGFMLVFGDLVFIPFTFTIQGWWLLGNKVELPLLASVANCIIFLIGYLVFRGANKQKHLFKKDPKAPIWGKPPKVVGGKLLVSGYWGIARHCNYLGDLLLALSFSLPCGASSVIPYFYPTYLLILLIWRERRDEARCSEKYKDIWAEYCKLVPWRILPYVY

SEQ ID NO: 10333 - protein, 120 aa, Glycine max; identical to SEQ ID NO: 3350

SEQ ID NO: 10334 - protein, 51 aa, Zea mays
NMIVKSPHLIRAEHRAARIGTWVTGPMPGNTMKAPGGLKTRAYDASPARLR

SEQ ID NO: 10335 - protein, 324 aa, Salmonella enterica subsp. enterica serovar Typhi
MQYNTLGNTDLRVSRLCLGCMTFGEPSRGNHAWTLPEESSRPIIKRALEGGINFFDTANSYSDGSSEEIVGRALRDFARRDEVVVATKVFHRVGDLPEGLSRAQILRSIDDSLTRLGMEYVDILQIHRWDYTTPIEETLEALNDVVKAGKARYIGASSMHASQFAQALALQKQHGWAPFVTMQDHYNLIYREEEREMLPLCWQEGVAVIPWSPLARGRLTRPWGETTARLASDDVGKNLYDESDKNDAQIAERLAGVSEALGATRAQVALAWLLSKRGVAAPIIGASREEQLDELLNAVDLTLKPEQIAELETPYKQHPVVGFK

SEQ ID NO: 10336 - protein, 224 aa, Oryza sativa
  unsure (1)..(224): unsure at all Xaa locations
MAAVAAASPALTLAVAAAGGGAACLLLCAEAVWLDLPQSGTKCVSEEIQSNVVVLADYALMYESHPSSHPTIAVKVTSPYGNTLHHNENATVGQFAFTTSEAGNYLACFWIDSAEKGXXEYLFNLDWKIGIAAKDWGXYSLRKEKIEGVELELRKXLEVAVQIIXHQNMIISQSKEAEMRTVSEXKTXARVGLFKIFGKTVCIGGLNLAMGHXLQGYFQKKKLI

SEQ ID NO: 10337 - protein, 520 aa, Ferroplasma acidarmanus
MVDNKTKQYSNRLMTGQVGTWGAIAEEISAMAPACDSIAFVVSSAVFAFFLTPLSFIIATLTMFLEVNTLYHLSKRHASAGGYYGYIANAFGPVPAISAGLMYPMYQTVSTAAIPVFVAGVVLPGVVMYFLGVGMPAWIWIPFILAFIIVPIVIAIVGIRPQMKYIRVAGFFEIIFLAVLSAIIIIKAPDNTLNVFNPFAWPQYSSWFAPEGGVFTGVGLGMIFGLTSFIGYGGSAPLGEEATNPKAITRSLTFGLFIVGIVMTEVAYAQIVGWGIPLMQTFSSSGIPGIIVATTYTGIVGGVMFALVAFNSAFSDGVAMQANAGRVYFAMGRDGIIPKFFSFIHKKYVTPSKALIFVGVVSSIVAVLSTFIVAMGAGVSPYALMDNKASDPVIIKALTDTFQFLTTMALAGLIITHILLNTSVMTMFRRLKEKHTGIRDIVLHMTQHYLFPSIATVIFIFVLYESLVPPVYPITYAILIIGVYTVFSVVYALYIKYKKPELAKKAGKYVNIVDEEHDKS

SEQ ID NO: 10338 - protein, 306 aa, Lupinus arboreus
PPERRKPREEGLRHCLQIGVEALKARKSPLDVVELVVRELENNEHFNAGIGSVLTNSGTVEMEASIMDGKSMKCGAVSGLSTVLNPISLARLVMEKTPHMYLAFQGAQDFAKQQGVETVDSSHFITAENVERLKLAIEANRVQIDYSQYNYTQPVQDDAEKELPVANGDSQIGTVGCVAVDSQGNLASATSTGGLVNKMVGRIGDTPLIGAGTYANELCAVSATGKGEAIIQATVARDVAALMEFKGLSLKEAADYVVHERTPKGTVGLIAVSAAGEIAMPFNTTGMFRACATEDGNSEIAIWPPA

SEQ ID NO: 10339 - protein, 463 aa, Bacillus subtilis subsp. subtilis str. 168
MLPELQRSITWIQGTALTIGAVLGCGILILPSVTADTAGPASLFVWVFMSFLSFFLVGTLARLVKIAPSAGGITAYVQLAFQKKAGAILGWIMLGSVPIGVPIIALTGAHYVSYITEAADWQITLIAGCMLAISILLHMRGIQLSANISTLVICVIVFLLVTSIAVSLPHVTIAEFKPFLPHGWSAAGSVSVMIFFSFVGWEMITPLAEEFHRPEKDVPLSLFLAASCVAGLYIMLSFVTVGTHSYGENGEIASLAMLISKGAGESGVYVTVCLALFITFATIHANIAGFSRMVYALAREGHIPVFFGKLSATKRTPIRVLTAMAAVFGLVLAAHGLFQIDLTTLLKGPSAAFIASYICTMAAALKLLGRRDIGWWMALGAFVACAVIYSFSGWALLYPAVLAAAGYFYMKTKGGHKKSLITFCDQAFPFIRFDARYFQNRCVETCRSQDRSARFPNPLSWPP

SEQ ID NO: 10340 - protein, 602 aa, Zea mays
  unsure (1)..(602): unsure at all Xaa locations
MAVGGDANGGGGGVRQRQRGCSCTKADFFPEESFSSWSAYGRALRSTGPRLADRLTSRSLESTELHEVRARSGADMKRDLTWWDLVWFGXGAVIGAGIFVLTGQEAREDVGPAVVVSYVVSGVSAMLSVFCYTEFAVEIPVAGGSFAYLRVELGDFMAFVAAGNILLEYCIGGAAVARAWTSYFATLLNHQPSDFRIHASSLSADYSELDPIAVVVIALVCIFAVASTKGTSRFNYVLSIVHIAVIVFIIVAGLTKADAANMRDFMPFGVRGIFSASAVLFFAYIGFDAVSTMAEETKNPARDIPIGLVGAMTLTTALYCVLAVTLCLMQPYASIDKDAPFSVAFSARGMDWAKYIVAFGALKGMTTVLLVSAVGQARYLTHIARTHMMPPWLAQVHPRTGTPVNATVVMLVATAIIAFFTDLGILSNLLSISTLFIFMLVAVALLVRRYYVAGETTVANRNKLAACIIAILATSSATATCWGVNVNGWVPYAVTVPAWFASTVCLWAFVPQARAPKLWGVPLVPWLPSASIAINVFLLGSIDYKSFMRFGFWTAGLLVYYLFVGLHASYDTAKALAADSAMAKVEDGDGKPARGAVHNGEY

SEQ ID NO: 10341 - protein, 364 aa, Zea mays
MAGTVTVPGSSTPSTPLLKDELDIVIPTIRNLDFLEMWRAFFQPYHLIIVQDGDPTKTIKVPEGFDYELYNRNDINRILGPKASCISFKDSACRCFGYMVSKKKYIYTIDDDCFVAKDPSGKDINALEQHIKNLLSPSTPFFFNTLYDPYREGADFVRGYPFSLREGAHTAVSHGLWLNIPDYDAPTQLVKPKERNERYVDAVMTIPKGTLFPMCGMNLAFDRDLIGPAMYFGLMGDGQPIGRYDDMWAGWCVKVICDHLSLGVKTGLPYIWHSKASNPFVNLKKEYKGIFWQEDIIPFFQNVTIPKDCDTVQKCYIYLSGQVKEKLGTIDPYFVKLGDAMVTWIEAWDELNPSTPAAANGKAK

SEQ ID NO: 10342 - protein, 228 aa, Oryza sativa
  unsure (1)..(228): unsure at all Xaa locations
MASQSKKRRIAGGGDGEDRISELPDDLLGHILSFLPNNLAARTAVLSRRWRYIFGYVHTISFEEEVYFQXPRRRRAXAGSSSTGXTPRSSAAAAAPAATXPLRSFHFACDSYHVWDRVIFWIGPICAGGERDRLSTIVDSEPPVFPGRHYELPRSLYSCVALQTLCLSYCDLNLLESIDLSLLKTMRLTGIHGSRSRIQRLISSCPRLADLTLEALQWATPSXHVLLX

SEQ ID NO: 10343 - protein, 168 aa, Glycine max
QGTKPSRRAFFQLPLARGLAPSSAQKDSSASTKSAPQGTHNRADLTFVLNEDNRADLVNALKSKIQSLAGQHSDILETLSPNVRKRVERLRERHGRHEEKEAQNFEERAALEAKYQKLYQPLYTKRDEIVNGTTEVEEGAAKETAPDNEEDQEKGGPAFWATALKKQR

SEQ ID NO: 10344 - protein, 438 aa, Brassica rapa
TFSFLLVFVVSIIFHPALSIYINTLSSTESLTISGNRTLVSPGDDFELGFFKTTSRSRWYLGIWYKKISERTYVWVANRDSPLSNAVGTLKISGNNLVLLDHFNKSVWSTNLTRGNERSPVVAELLANGNFVIRYFSNNDASGFLWQSFDYPTDTLLPEMKLGYDIKTGLNRFLTSWRSYDDPSSGEIVYKLDTQRGMPEFFLLKNDFPAHRSGPWNGIGFSGLPEDHKLGYMAYNFIENSEEVAYSFRMTNNSIYSRLEINSDGDLERLIWTPTSWEWSLFWSSPVDLQCDVYKTCGPYAYCDLNTSPLCNCIQGFTPSNVQQWDLRNPSAGCIRRTRLSCRGDGFTRMKNMKLPETTIATVDRNIGLKECKKMCLSDCNCTAFANADIRNGGTGCVIWTGRLHDIRNYAADGQDLYVRLAAVDLAQKRNANGKIIT

SEQ ID NO: 10345 - protein, 282 aa, Neurospora crassa
MTSDKPVVAATTTKTKKSKQQTIHYPFWFGGSASSMAATVTHPLDLVKVRLQMRTGDAPKTMSGTVLHIIRHNGITGLYNGLSASLLRQITYSTTRFGIYEELKTRFTTKDHPASFPVLIAMATVSGVAGGLVGNVADVLNVRMQHDAALPPAQRRNYAHAIDGLARMTREEGFRSWFRGVWPNSARAAAMTASQLASYDVFKRILIRHTPLEDNLATHFSASFLAGVAAATVTSPIDVVKTRVMSASGKSSIGQVLGSLYAQEGVRWMFKGWVPSFLRLGP

SEQ ID NO: 10346 - protein, 231 aa, Triticum aestivum
LQHLRPGMVLLKSFLKPDDQVEIIKLCRELGVGTGGFYQPAYRDGGKLSLRMMCLGKNWDPDSRSYGDIRPYDGAQPPQMPQELTKFVEEAIKASHDFLKQRGKGATDPAVELPLMSPDICIVNFYTTGGKLGLHQDKDEDKSSLDKGLPVVSFSLGDTAEFLYGDDRDVDKASKIKLESGDVLIFGGQSRRIFHGVSSIAPKSAPLWVTDKANLRPGRLNLTFRQHKYEP

SEQ ID NO: 10347 - protein, 161 aa, Glycine max
MSGTLIYLGVNSLRSSPGNSLRQPKPTRLHNGNARLSTGATSFRASAAQTLNAEPAVTESVRRRASNLYELLRVDETASLTEIKTAYRSLAKVHHPDASSESDGRDFMEIHKAYATLADPTTRAIYDSTLGARGRRVHAGAMGRTSRVYPTTRRWETDQCW

SEQ ID NO: 10348 - protein, 137 aa, Schizosaccharomyces pombe
MSFSGVKVSPECLEAFQELKLGKSLRYVVFKMNDTKTEIVVEKKSTDKDFDTFLGDLPEKDCRYAIYDFEFNLGEGVRNKIIFISWSPDVAPIKSKMVYSSSKDTLRRAFTGIGTDIQATDFSEVAYETVLEKVTRK

SEQ ID NO: 10349 - protein, 459 aa, Brassica rapa
MTSINVKLLYHYVITNLFNLCFFPLTAIVAGKAYRLTIDDLHHLYYSYLQHNLITIAPLFAFTVFGSVLYIATRPKPVYLVEYSCYLPPTHCRSSISKVMDIFYQVKKSCPSRNGTCDDSSWLDFLRKIQERSGLGDETHGPEGLLQVPPRKTFAAAREETEQVIIGALENLFKNTNVNPKDIGILVVKSSMFNPTPSLSAMVKNNFKLRSNVRSFNLGGMGCSAGVIAIDLAKDLLHVHKNTYAFVVSTENITYNIYAGDNRSMMVSNCLFRVGGAAILLSNKPGDRRRSKYELVHTVRTHTGADDKSFRCVQQGDDENGKIGVSLSKDITDVAGRTVKKNIATLGPLILPLSEKLLFFVTFMGKKLFKDKIKHYYVPDFKLAIDHFCIHAGGRAVIDVLEKNLALAPIDVEASRSTLHRFGNTSSSSIWYELAYIEAKGRMKKGNKVWQIALGSGFK

SEQ ID NO: 10350 - protein, 509 aa, Sesamum indicum
MALPLLILSFLTIFIAYKLFQRLRYKLPPGPRPLPVVGNLYDIKPLLVRCFTEWSQVYGPIFSVYLGSHLSVVVNSAELAKEVLKDNDQQLANRNRTRQIAKFSKNGADLIWSDYGPHYVKVRKLCTLELFSMKRLEGLRPIREDEVTAMVESIFKDCNKPENKGKALVLREYLGMMAFLHIARLTFGKRFMDSNGVVDGQGEELKAILHNGIKLGTKKSWAEFLPWFRFLFKTENQLLAEHDALADSFTKKIMQEHTLARQKTGNTKNHFVDALLTLQKEYDLSDDTVIGLLWDMISAGMVTTTITVEWAMAELVRNPRVQQKVQEELDRVVGSDRVMTEADIPNLPYLQCVTKECFRMHPPTPLMLPHKASTNVKIGGYDIPKGATVSVNVWALARDPAVWKNPLEFRPERFQEEDIDMKGTDYRLLPFGSGRRICPGAQLAIYLVTSMLGHMLHHFTWTPPAGTKPEDMDMMEQPGTVTYMRTPLQAVPTPRLPADLFKRVASGNV

SEQ ID NO: 10351 - protein, 396 aa, Bifidobacterium longum NCC2705
MSIASNSTVIILGSTGSIGTQGLDVISRHPERFTVTGLAAGGAHIELLAQQAAQFHVSEVAVFDETKVPALQAALAQAGAQGVRVTGGPDSVIAMAGSGANVVLNGITGSIGLEPSIAALKAGSQLALANKESVVAGGHLLFSAQVRENQINPVDSEHSAIWQSLRSGTHAEVAKLVVTASGGPFRGWKRADMENITPEQALHHPTWNMGPVVTINSSTLMNKGLEVIEASRLFNVPPERIDVTVHPQSIVHSMVEFVDGATICQASPPDMRLPIALGLSAPDRMTNVAAACDWTQAATWTFEPLDDEAFPAVQLARHCLAASEKHTAVLNAANEQAVHAFLEHRLPYLGIVDTVKAVLDQMDAELRGNPLFTDVEEMNQLELEARRRADDLINKQ

SEQ ID NO: 10352 - protein, 357 aa, Solanum tuberosum
MALQIAKRLLRCRADSVASSVRFFDRTFTSESNSNLIRATLFPGDGIGPEIAESVRQIFKVAEVPIEWEEHYVGTEVDPRTNSFLTWESLESVRRNKVGLKGPMATPIGKGHRSLNLTLRKELNLYANVRPCYSLPGYKTRYDDVNLITIRENTEGEYSGLEHQVVRGVVESLKIITRQASLRVAEYAFHYAKTHGRERVSAIHKANIMQKTDGLFLKCCREVAEKYPEIKYEEVVIDNCCMMLVKNPALFDVLVMPNLYGDIISDLCAGLIGGLGLTPSCNIGEGGIALAEAVHGSAPDIAGKNLANPTALLLSSVSMLRHLELHDKADRIQDAILKTIAGGKVPNWRPWRHCYNN

SEQ ID NO: 10353 - protein, 352 aa, Cabomba sp. SM-1999
DLEPVNPADMPSTAAGALKSYKLAAKAISRLQVLPSGNIGLLCDVLVREVSELTGYDRVMAYKFHEDEHGEVIAECKRPDLESYLGLHYPATDIPQASRFLFIKNKVRMICDCTAAPVKVIQNENLEPPLSLCGSTLRFPHGCHVQYMTNMGSIASLVMSVVINESDEATANDQPEAAATSEQPQKGRKLWGLVVCHHRKPRFIPYPLRYACEFLIQVFSVRLNKEVELAIQVREKHILRTQTVLCDMLLRDAPVGIVTQSPNIMDLVKCNGAALYYGKQFWLLGTTPTEAQIRDIIAWLHESHGSSTGLSTDSLMEAGYPRALVLGNAVCGMAAVKITSRDFLFWFRSHTA

SEQ ID NO: 10354 - protein, 52 aa, Zea mays
MSMIPISNRRRLSPGDRIWEPFELMNTFLDFPSPALFLSHHFPSLSRGGARY

SEQ ID NO: 10355 - protein, 320 aa, Oryza sativa
  unsure (1)..(320): unsure at all Xaa locations
XLDLNVESPGGSAATSSSSTPPPPPDGGGGGYFRFDLLGGSPDEDGCSSPVMTRQLFPSPSAPPLTMPMPAAAGEGPWPRRAADLGVAQSQRSPAGGKKSRRGPRSRSSQYRGVTFYRRTGRWESHIWDCGKQVYLGGFDTAHAAARAYDRAAIKFRGLDADINFNLNDYEDDLKQMRNWTKEEFVHILRRQSTGFARGSSKYRGVTLHKCGRWEARMGQLLGKKYIYLGLFDSEIEAARAYDRAAIRFNGREAVTNFDPSSYDGDVLPETDNEVIDLNLRISQPNVHELKSDGTLTGFQLNCDSPEASSSLLLLPGWMX

SEQ ID NO: 10356 - protein, 251 aa, Oryza sativa
MGSKSYPTVSDEYLAAVGKAKRKLRGLIAEKNCAPLMLRLAWHSAGTFDVSSRTGGPFGTMKNPGEQSHAANAGLDIAVRLLDPIKDQLPILSYADFYQLAGVVAVEVTGGPEVPFHPGRQDKPEPPPEGRLPDATQGSDHLRQVFSAQMGLSDKDIVALSGGHTLGRCHKERSGFEGAWTSNPLIFDNSYFTELVSGEKEGLFQLPSDKALMADPAFRPLVEKYAADEDAFFADYAEAHLKLSELGFAEE

SEQ ID NO: 10357 - protein, 474 aa, Oryza sativa
EEHSKDLTVEAMMLDSRAADLDKEERPEILSLLPPYEGKSVLELGAGIGRFTGELVKTAGHVLAMDFIESVIKKNESINGHHKNASFMCADVTCPDLMIEDNSIDLIFSNWLLMYLSDEEVEKLVKRMVRWLKVGGYIFFRESCFHQSGDSKRKVNPTHYREPRFYTKVFKECQALDQDGNSFELSVLTCKCVGAYVKSKKNQNQICWLWQKVDSTEDRGFQRFLDNVQYKASGILRYERIFGEGFVSTGGIETTKEFVDRLDLKPGQNVLDVGCGIGGGDFYMADKYDVHVVGIDLSINMVSFALERAIGRKCSVEFEVADCTKKTYPDNTFDVIYSRDTILHIQDKPSLFKSFFKWLKPGGKVLISDYCKCPGKPSEEFAAYIKQRGYDLHDVRAYGQMLENAGFHDVIAEDRTDQFLDVLERELAKVEKNKNEFVSDFSQEDYDAIVNGWKAKLQRSSAGEQRWGLFIATK

SEQ ID NO: 10358 - protein, 266 aa, Zea mays subsp. mays
PSADPSTDSAREPKRMRTGGGSTSSSSSSSSSMDGGRTRSSVVEAAPPATQASAAANGPAVPVVVVDTQEAGIRLVHALLACAEAVQQENFSAAEALVKQIPMLASSQGGAMRKVAAYFGEALARRVYRFRPPPDSSLLDAAFADLLHAHFYESCPYLKFAHFTANQAILEAFAGCRRVHVVDFGIKQGMQWPALLQALALRPGGPPSFRLTGVGPPQPDETDALQQVGWKLAQFAHTIRVDFQYRGLVAATLADLEPFMLQPEGD

SEQ ID NO: 10359 - protein, 787 aa, Triticum sp.
MTTDQPVISLRPGGGGGGPRGGRLFAPAFAVAASGSGDFLRPHGGGAFRALQDWCLHLSHERVRYSRDQLLDLRKITDVTEQILRLQQEIEAELNGDDQSWVRNDSNVQLQTQAQPQVQAQNRFTETDNRDWRARTEKPPAPAVQEEKSWDNIREVKEQYNASGRQQEQFNRQDQSSSQKAQVGPPPALIKADVPWSARRRNLSEKDRVLKTVKGILNKLTPEKFDLLKGQLLDSGITTADILKDVISLIFEKAVFEPTFCPMYAQLCSELNDNLPTFPSEEPGGKEITFKRVLLNNCQEAFEGADSLRVEIASLTGPDQEMEKRDKERIFKLRTLGNIRLIGELLKQKMVPEKIVHHIVKELLGSDKKACPDEEHVEAICQFFNTIGKQLDENPKSRRINDTYFVQIRELVANPQLTPRSKFMVRDLIDLRSNNWVPRRAEIKAKTISEIHTEAEKNLGLRPGATANMRNGRNAPGGPLSPGGFSVNRPGTGGMMPGMPGSRKMPGMPGLDNDNWEVQRARSMPRGDPLRNQGPLINKVPSINKPSPINPRLLPQGTGALIGKSALLGTGGPPSRPSSLTASPTPLPAQTTASPKPSSATPASVPIPDKAASSAKVIPAGLQKKTASLLEEYFGIRILDEAQQCIEELQSPDYHPEIVKEAINLALDKGASFVDPLVKLLEHLYTKKTFKTEDLENGCLLYGSLLEDIGIDLPKAPTQFGEVVARLILSCGLRFEAAEGILKAMEDTFFRKAIFTSVTKTLGADPAGQAILSSHAAVVDACNSLSI

SEQ ID NO: 10360 - protein, 365 aa, Candida glabrata
MAVTKTIVVPPGDHVGQEITEEANKVLNAIQECRPDKVNFKFDHHLIGGAPIDATGVPLPDEALEASKKADAVLLGAVGGPKWGTGAVRPEQGLLKIRKELQLYANLRPCNFASDSLLDLSPLKPEIARGTDFVVVRELVGGIYFGERKEDEGDGVAWDSEKYSVPEVQRITRMAAFMALQHNPPLPIWSLDKANVLASSRLWRKTVEETIKNEFPQLTVQHQLIDSAAMILVKNPTHLNGIIITNNMFGDIISDEASVIPGSLGLLPSASLASLPDKNTAFGLYEPCHGSAPDLPKGKVNPVATILSAAMMLKLSLDLFEEGEIIEQAVKKVLDSGIRTADLKGTNSTTEVGDAVAKAVRELLA

SEQ ID NO: 10361 - protein, 457 aa, Glycine max
QMGTSKSCKSEELCTELLESQTGDTSTGSVIQTLRLQVFGVLHWVVSLGLILAIDFLLKKAFVAASIEFPSALFGMFCIFSVLIILDCAIPSAAVALMKFFEPGIMFIQRWLPLFYVPYLVVLPLSLKDIPPSSAIKICFIVVGGWLATLCVTGMTAIGVRKAVKTELIDAEPMEKPSPFSSIELWAWTGIFLISFVASLVYPTALGTRARTYLPFLLASTVLGYMIGSGLPSSVKKVLHPIIFCAASAEVTAVVFGFLSKSGLDPVLGYYLTNSSSDPGAGDILMGFLGSVILSFAFSMFKQRKLVKRHAAEIFTSVIISTLFSLYSTALVGRLVALEPSLTVSILPRCITVALALSIVSFFEGANASVTAAAVVVTGLVGANFVQATLDKLRLRDPIARGIATASSCHGLGTAALSAKEPEALPFCAIAYGLTGIFGSILCSIPVVRQSLLAVIG

SEQ ID NO: 10362 - protein, 241 aa, Saccharum officinarum
GIRHEVGTSTFSEYTVMHVGCVAKINPEAPLDKVCVLSCGISTGLGASINVAKPPKGSTVAIFGLGAVGLAAAEGARIAGASRIIGVDLNANRFEEAKKFGCTEFVNPTDHNKPVQEVLAEMTNGGVDRSVECTGNINAMIQAFECVHDGWGVAVLVGVPHKDAEFKTHPMNLLNERTLKGTFFGNYKPRTDLPNVVELYMKKELEVEKFITHSVSFAEINKAFDLMAKGEGIRCIIRMEN

SEQ ID NO: 10363 - protein, 263 aa, uncultured bacterium pCosHE1
GYLPENLFAPAPQSRFDGEWNEMDMVGFARLMAAHRHEIAAVILEPIVQGAGGMRMYHPEWLKRIRKMCDREGILLIADEIATGFGRTGKLFACEHANITPDILCLGKALTGGTMTLSATLTTRQVADTISDGEAGCFMHGPTFMGNPLACAVANESLALLQNGEWQTQVAAIEAQLKEELSAASGANFVADVRVLGAIGVIETTHPVNMAALQRFFVERGVWVRPFGKLIYLMPPYIITAEQLRTLTAAVVEAVNIPAHFTI

SEQ ID NO: 10364 - protein, 924 aa, Pisum sativum
MMELRVICIIRLVVACVLCLCIFIRSASSATEGFESIACCADSNYTDPKTNLNYTTDYRWYSDKSNCRQIPEILLSHRSNINFRLFDIDEGKRCYNLPTIKDQVYLIRGTFPFDSVNTSFYVSIGATELGEVTSSRLEDLEIEGVFRAPKDNIDFCLLKEDVNPFISQLELRPLPEEYLHDFSTNVLKLISRNNLCGIEDDIRFPVDQNDRIWKATSTPSYALPLSFNVSNVELNGKVTPPLQVLQTALTHPERLEFVHVGLETDDYEYSVLLYFLELNDTLKAGQRVFDIYLNSEIKKEGFDVLEGGSKYSYTVLNISANGSLNITLVKASGSKFGPLLNAYEILQARPWIDETDQTDLEVIQKMRKELLLQNQDNEALESWSGDPCMLFPWKGVACDGSNGSSVITKLDLSSSNLKGTIPSSVTEMTKLQILNLSHNHFDGYIPSFPPSSLLISVDLSYNDLTGQLPESIISLPHLNSLYFGCNQHMRDDDEAKLNSSLINTDYGRCNAKKPKFGQVFMIGAITSGSILITLAVVILFFCRYRHKSITLEGFGGKTYPMATNIIFSLPSKDDFFIKSVSVKPFTLEYIELATEKYKTLIGEGGFGSVYRGTLDDGQEVAVKVRSATSTQGTREFDNELNLLSAIQHENLVPLLGYCNEYDQQILVYPFMSNGSLLDRLYGEPAKRKILDWPTRLSIALGAARGLAYLHTFPGRSVIHRDVKSSNILLDHSMCAKVADFGFSKYAPQEGDSYVSLEVRGTAGYLDPEYYKTQQLSEKSDVFSFGVVLLEIVSGREPLNIKRPRVEWSLVEWAKPYIRASKVDEIVDPGIKGGYHAEALWRVVEVALQCLEPYSTYRPCMVDIVRELEDALIIENNASEYMKSIDSLGGSNRYSIVMDKRALPSTTSTAESTITTQNVSHPQPR

SEQ ID NO: 10365 - protein, 360 aa, Oryza sativa
SSDAAAAQAATPLLKDELDIVIPTIRNLDFLEMWRSFFQAYHLIIVQDCDPKKTIRVPEGFDYELYNRDDINRILGPRASCISFKDSACRCFGYMVSKKKYIYTIDDDCFVAKDPSGKDINALEQHIKNLLNPSTPFFFNTLYDPYRDGADFVRGYPFSLREGAPTAVSHGLWLNIPDYDAPTQLVKPLERNSRYVDAVMTIPKGTLFPMCGMNLAFDRDLIGPAMYFGLMGDGQPIGRYDDMWAGWCTKVITDHLGLGVKTGLPYIWHSKASNPFVNLKKEYNGIFWQEELIPFFQSASLPKEADTVQKCYLELAKQVRAKLGKVDGYFNKLADSMVTWIEAWDQLNPPTVATANGTAK

SEQ ID NO: 10366 - protein, 1551 aa, Neurospora crassa
MTSSASQQNQNPAQPTSAPAATSYASAAGAKKPTSTPLIATGSQPPVVVGSSAQNGKPQAAPVNGRPNITPAVPIARGSSGLNGASADHSRKSSVTISAAPPSHNANGGPVGGAKAIQFGFDESPAITHSTPHAAGSVPIPIPGSNARVPSPAASPSPIPQVPQQSGGQRAPSNISAPMTFGSFPGDNDRHMKQHSISHSNGPVHTRRDSQASAHGETVGHMASHRGGYQGQGRGRGGYNNSYNNPNMGFPPTRSYNGPQHNAGRGGMNNFQGRGGMQQYPNSPQPHRSSPAPAHAVPTHGTPTMASASLAPTQPPFYPGMNMYQQQVKPPSFSNDYSSFKPVNKKNKGTRRDSDSIHPRHPNPSQQKSSTSDDSTQKPRRQSKRWASKADGYQEVDGGPPLPEYSNAPPARYDFVPLRSVPMFSPPSLGIDLSPESGQFENVLTKQKQVPGYPAPMDYRGPVFNPYSQPMPYMGQPVPHFQPAYVPPTFVPQGQPVAQPMSRNASQVSDRPASSTGQVQAPVVAQSTPTQRPAQAAPAIVSSNFARPKKSAGITIKDPNGNPLDLSAIKGPVSPAPSIQQQSKTPPVVASTPTPPPAKPTAPSHGRTESTTGKTAEQLRDEFKNAVQKAKTEAPADNKTNEEEAAKAAAEKAAAEKEAADKAAAEKEAADKEAAEKAAAEKAAAEKEAADKAAAEKEAAEKKAVEEAKAKEEAEAKAKADADASAAAAAAKKPEAKEESEIDYNNLDFAKLTDKELNNIDHSKLSDEQMDAYFNELEERDARREKEQAEISKKKAAEAEEAKKKAEAERLANAAENDRKLREQEREMERLEEERERKRKERESGQGESVADLLTKEADDKKETDAASKTLGKNKPAALNLAPLNTKSVEAPQPSAALQSLRSARLLPGVQYDIYPAGIASPNPALNQAVSKKGKMFKYDANFLLQFQTVFTEQPSPEFHQQVKSLIGDSDGGRSASARTPGAGSQRGRGGASGGGFPAMGQFSGKPALPPGTTSAERFAMSQQAGGMGSLGRPGAMGTMAFGRQGTFPGNLSRTPSSTATPDSPRQGSRRKPREGYSKNEAQAAKNMPLTAGMEVKPITVSATGWKPMSIGAKKAEAPAPGHLDPETVQRKVKAALNKMTPEKFDKISDQILEIAHQSKNEQDGRTLRQVIQLTFEKATDEAHWASMYAKFCKRMLETMSPEIRDENIMDKQGNVVSGGALFRKYLLNRCQEEFERGWKVDLPKPKEGEEGDKKASEAVLMSDEYYIAAAAKRRGLGLVQFIGELFKLGMLTERIMHECVRKLLEFTGVPDEAEIESLTKLLRTVGGNLDSTEKGRPLMEVYFGRIQQIMDLPDLPSRLKFMLMDVVDLRKARWHSKEANKGPKTLEEIRAEAEAAAAAKAVENARTGQRGLGGRAASGRGDARGFPYNQSMTNNQVELGDLKRLKGNTSRSGSQGMSFGPPTSMFNSRSNSGRRQVGGPGGAFGRGGDDSGGSSRTASMRGNDSVSHANAFSLLADAGDHPGSPPSASASPALSKVTPDTTNNDEKKDE

SEQ ID NO: 10367 - protein, 337 aa, Zymomonas mobilis
MAILITGIAGFIGSFAAKSLLERGEEIVGIDNLNDYYDPELKKKRLAELKKLKNGKLHFSPIDFSDGALLNNTLEKFDFDRIIHLGAQAGVRYSLINPQIYGDSNLIGHLNILELARHRKVRHMVYASSSSVYGNRSTLPFKVDSQPDYPASLYAATKRAGEMLSESYAYLYRIPLTGLRFFTVYGIWGPPDMAMWIFTKKILQKQPIMLFNNGEMQRDFTYIDDAVSGLIAALDNPPQDNNKIKSGGSLNPHNLYNIGNHHPENLKYLVELLEEACGCHAIKELRPMQAGDVSTTYADIETSKRDLGFYPKDYAGYRSRPFCRMVSPLYHPFMKLL

SEQ ID NO: 10368 - protein, 465 aa, Streptococcus mutans UA159
MSHQNAKNTTQNPKELENGMVRGLQNRHVQLIAIAGTIGTGLFLGAGRSISLTGPSIIIVYLLTGLFMFWMMRAMGEMLYHDPDQHTFINFITKYIGKEWGYFAGWSYWVSVIFLGMAEITAIAKYVQYWFPSWPAWIIQIVFLLILGSVNLIAVRVFGEAEFWFAMIKIIAILALIATAIFMLLTGFKTSQGPVSFANISKGFEMFPNGWMKFLMSFQMVFFAYQAIEFVGITVSETQNPRKVLPKAIQEIPMRIVIFYVGALIAIMTIFPWRALPSDTSPFVMVFKLAGIKWAAALINFVVLTSAASALNSTLYSTGRHLYQLANEAPNQFMKRFKIGTLSKTGVPSKAIIFSAIVIAISAFINVLPGIKDAFALITASSSGVYIAIYVLTMLAHLKYRKSNDFMADGYLMPHYKILNPITIIFMVFVFITLFLQDSTYIGAIGATIWIAAFGFYSKFKFKKQ

SEQ ID NO: 10369 - protein, 359 aa, Lycopersicon esculentum
MVFPLDSQLQNPISALLDGLYCEEDRFLDDDLGEWSSLDVGNENVKKTLPLLECDMFWEHDELATLLSKENEFHLGFQSLISDGSLMGARKEALDWMLRVIAYYGFTATTAVLAVNYFDRFVSGWCFQKDKPWMSQLAAVACLSIAAKVEETQVPLLLDLQVADSRFVFEAKTIQRMELLVLSTLKWKMNLVTPLSFIDHIMRRFGFMSNLHMDFLKKCERLILDIITDSRLLHYPPSVIATASMFYVINDIEPSNAMEYQNQLMSVLKVRKDIFEECHDLILELMDTACYKLCQSLKRKHHSVPGSPSGVIDAYFSSESSNESWSVASSISSSPEPQYKRNKTQDQRMTLAPLGSNLH

SEQ ID NO: 10370 - protein, 264 aa, Populus nigra
MLELRLVQGSLLKKVLESIKDLVNDANFDFSSSGFSLQSMDSSHVALVALLLKSEGFEHYRCDRNTSMGMNLGNMSKMLKCAGNDDIITIKGDDGSDTVTFMFESPTQDKIADFEMKLMDIDSEHLGIPEAEYHAIVKMPSAEFARICKDLASIGDTVVISVTKEGVKFSTRGDIGTANIVLRQNTTVDKPEDATVIEMNEPVSMTFALRYMNSFTKATPLSNTVTISMSPDLPVVVEYKIAEMGYVRFYLAPKMEEDEPEPGA

SEQ ID NO: 10371 - protein, 393 aa, Arundinella hirta
EPARTEDPALSIAGAVQSQKLAVRAISRLQALPGGDVKLLCDTVVEHVRELTGYDRVMVYRFHEDEHGEVVAENRRDNLEPYLGLHYPATDIPQASRFLFRQNRVRMIADCHATPVRVIQDPGLSQQLCLVGSTLRAPHGCHAQYMANMGSIASLVMAVIISSGGDDEQTGRGGISSAMKLWGLVVCHHTSPRCIPFPLRYACEFLMQAFGLQLNMELQLAHQLSEKHILRTQTLLCDMLLRDSPTGIVTQSPSIMDLVKCDGAALYYHGKYYPLGVTPTESQIKDIIEWLTVCHGDSTGLSTDSLADAGYLGAVALGDAVCGMTVAYITPSDYLFWFRSHTAKEIKWGGAKHHPEDKDDGQRMHPRSSFKAFLEVVKSRSLPWENAEMDAIH

SEQ ID NO: 10372 - protein, 751 aa, Geobacillus stearothermophilus
MENQNRQNAAQCPFHGSVTNQSSNRTTNKDWWPNQLNLSILHQHDRKTNPHDEEFNYAEEFQKLDYWALKEDLRKLMTESQDWWPADYGHYGPLFIRMAWHSAGTYRTGDGRGGASTGTQRFAPLNSWPNNANLDKARRLLWPIKKKYGNKISWADLFILAGNVAIESMGGKTIGFGGGRVDVWHPEEDVYWGSEKEWLASERYSGDRELENPLAAVQMGLTYVNPEGPDGKPDPKAAARDIRETFRRMGMNDEETVALIAGGHTFGKAHGAGPATHVGPEPEAAPIEAQGLGWISSYGKGKGSDTITSGIEGAWTPTPTQWDTSYFDMLFGYDWWLTKSPAGAWQWMAVDPDEKDLAPDAEDPSKKVPTMMMTTDLALRFDPEYEKIARRFHQNPEEFAEAFARAWFKLTHRDMGPKTRYLGPEVPKEDFIWQDPIPEVDYELTEAEIEEIKAKILNSGLTVSELVKTAWASASTFRNSDKRGGANGARIRLAPQKDWEVNEPERLAKVLSVYEDIQRELPKKVSIADLIVLGGSAAVEKAARDAGFDVKVPFFPGRGDATQEQTDVESFAVLEPFADGFRNYQKQEYSVPPEELLVDKAQLLGLTAPEMTVLVGGLRVLGANYRDLPHGVFTDRIGVLTNDFFVNLLDMNYEWVPTDSGIYEIRDRKTGEVRWTATRVDLIFGSNSILRSYAEFYAQDDNQEKFVRDFINAWVKVMNADRFDLVKKARESVTALQDSHHLRSGAGTDLQ

SEQ ID NO: 10373 - protein, 477 aa, Methanosarcina acetivorans C2A
MWEEGGSILDYGEPETLEKWRNSEKTEKSEDPMRKQETELDFFEQEIGLLDVVGPRAREIIGQDCKVMSACVSRPYPLVVDRAKGSVIKDIDGKEYIDFIAGIAVMNSGHSNPEVNAAISAQLEKMVHCGYGDFFAEPPLKLAKKLRELSGYSKVFYCNSGTEAVEAAMKLALWKTKRPNFIAFYNAFHGRTLGALSLTCSKVRQKEHFPTMRTVHTHYAYCYRCPLNLEYPSCGVECAKQIENLIFRKELSPEDTAAVFIEPVQGEGGYIVPPQEFHKEVKRICTDNDVLLIADEVQTGCFRTGPFLAMENFEVRADITCLAKALGAGLPIGAMLADSTLMDWPPGVHSNTFGGNLLSSASALASLEFLEKENMENRVREMGTHIRQRLRELQENCPCIGDVRGLGLMIGAEIVKSDKSIDPIRRDRIVREAFKEGVLLLPCGDSVIRFSPPLVMTDEEADLGLDKFEKALRRAAK

SEQ ID NO: 10374 - protein, 100 aa, Zea mays
SDDLLLDQSALRQQVKKGGGGEGGGGGSVSGSGGGNLNPWECSPKCGSRCSKTQYRKACLTLCNKCCAKCLCVPPGFYGNKGACPCYNNWKTKEGGPKCP

SEQ ID NO: 10375 - protein, 445 aa, Novosphingobium aromaticivorans
MQQGSGAMNKVRGSKVRGLGFWMTLALVVGNMIGSGIYILPATLAPLGFNQLIGWAVTLAGALCLAAAFARMGARLPLAGGPYAYAQAAFGPIPGFVTAWSYWTMLWAGNGAVAVALVSNLSLIAPWIGATPAVPALLSVGFVWLLTLVNIRGVRAAGDVSVVTTALKLVPLAGLIGLAIWLLITGAPTVVQPEVPLSGGVIATAAGLTFWGFLGLESATVPADKVENARTVVPRATLIGVAITGLVYMGISGAFALYMPMADAAASPAPVADFLARFFGSGMGQVVALFAAISAFGTLNGFILLQGEVPWAMARGGVFPRWFAAEGPRGTPVRSHVVSSILLSIVTLLNYGRGMGDLFAFIASVSLAAGMLSYFVAMLAAVRLLPDERPMVIAALVGAAFIAWAAWGLGAEALTYGAGFVALGLPVYLWIRRDGAASTTANDPG

SEQ ID NO: 10376 - protein, 166 aa, Triticum aestivum
MADVEYRCFVGGLAWATDDQSLQNAFSKYGDVIDSKIITDRETGRSRGFGFVTFASDEAMRQAIEAMNGQDLDGRNITVNEAQSRRSGGGGGGFGGGGGGGGYGGQRREGGGGGGYGGGGGGYGGGRSGGGGGYGSREGGGGYGSGGGGGGYGGSRGGSGGGNWRE

SEQ ID NO: 10377 - protein, 93 aa, Zea mays
MPVSAEEQAAPAATVKVLFFARARDLTGVADSAVEVPPGSTVGECLARVLAQFPKLEEIRGSVVLALNEEYAAVSAAVADGDELAVIPPISGG

SEQ ID NO: 10378 - protein, 76 aa, Glycine max
EQRETGGHENDEKTRAAIEILEREQRKVEEMPDLELEDNTRRLRQACFKANYKKRKLMGMRLIEPDSSLSGLFNKY

SEQ ID NO: 10379 - protein, 458 aa, Oryza sativa
  unsure (1)..(458): unsure at all Xaa locations
XKEAXNPXSKEKGECSQSSKSSMGDYSTSTSISDDSYGSFSGNGCRPHMSKDVRWGAIRRMAIQQGSLGLKNFKLLKQLGCGDIGTVYLAELVGSECMFALKVMDIEYLISRKKMLRAQTEREILQMLDHPFLPTLYSFFTTDNLSCLVMEYCPGGDLHVLRQKQPTRTFSEAAARFYVAEVLLALEYLHMLGVIYRDLKPENILVREDGHIMLSDFDLSLRCSVNPMLVRASSVGRDEPSRPSGPCAESCIDPLCIQPSCNSSCFTPRLVSSXXPSRPRRPRGEPQKKPSLPQLVVEPTDARSNSFVGTHEYLAPEIIRGDGHGSSVDWWTLGIFLYELLYGRTPFRGPGNEETLTNVVSQGLKFPDNPAVSFHARDLIRGLLVKDPEYRLGSTKGAAEIKRHPFFEGLNWALIRWTAPPETPKSFDAASLTTARKKKEGKCLEFRLNGDDIEFELF

SEQ ID NO: 10380 - protein, 212 aa, Triticum aestivum
MVSLKLQKRLASSVLKCGKGKVWLDPNEVNEISMANSRQNIRKLVKDGFIIRKPQKIHSRSRARRAHEAKQKGRHSGYGKRRGTREARLPTKILWMRRMRVLRRLLRKYREAKKIDKHMYHDMYLKVKGNMFKNKRVLMESIHKSKAEKAREKTLSDQFEAKRAKSKASRERKIARREERLAQGPRDHAPAPAAAAPAQAAAGTKEGQEVKV

SEQ ID NO: 10381 - protein, 169 aa, Triticum aestivum
MAEETGATAASGSAAGKMTMVVGVDESEHSYYALQWTLLHFFSPGQQQQYRLVVVTAKPTAASAVGLAGPGAADVLPFVEADLKRSSLRVIDKAKELCAQVSDAVFEVVEGDARNVLCEAVERHHAEMLVVGNHGYGAIKRAVLGSVSDYCTHHAHCTVMIVKKPKHKH

SEQ ID NO: 10382 - protein, 267 aa, Oryza sativa
  unsure (1)..(267): unsure at all Xaa locations
LDWNFFWLHSLQVLVLFSYLGYLAAAGAVLPGKLVSGTVLPDSSRLHIHXANGSAAAALALILYAFLMQCFLATSCVIADRGIELLSTTFIFSVIVTFLLYYSGLRSHHKSSSLKPHITGNFIQDWWLGVQLNPHFMGVDLKAGMMAWLFINLSLFAKSYLAGSANLSVILYQFFCAGWWLLRNKVELSLLAAVVNCFIFVIGYLVFRGANKQKHIFKKNPKALIWGKPPKLVGGKLLVSGYWSXIIMFGYLNFSRPFLALDXSCFL

SEQ ID NO: 10383 - protein, 270 aa, Lactococcus lactis subsp. cremoris
MTKKIVTLAGDGIGPEIMSAGLRVLKAVSKKIAFEYELVAKDFGGIAIDKHGHPLPEETLQAVKNADAILLAAIGHPKYNDAKVRPEQGLLALRKELGLYANVRPLKIYPALKNLSPIRNVENVDFVVIRELTGGIYFGQHELSDEKARDINDYTADEIRRILHFAFKIAQNRPRKLLTSVDKQNVLATSKLWRKIADEIAVEYPDVTLEHQLVDSCAMLLITEPQKFDVIVTENLFGDILSDEASSLAGTLALCPLVLMDLTDCHYMSQ

SEQ ID NO: 10384 - protein, 225 aa, Zea mays
  unsure (1)..(225): unsure at all Xaa locations
MVSLKPQKRLAAGVLKCGKGKVWLDPNEVYEISRXAQGYQGMANSRQNIRKLVKDGFIIKKPQKIHSRSRARRAHEAKQKGRHSGYGKRRGTREARLPTKILWMRRMRVLFFXRRLLRKYREAKKIDKHMYHDMYMKVKGNMFKNKRVLMESIHKSKAEKAREKTLSDQFEAKRAKSKASRERKIARREERLAQGPREPAAAPVSATGSVCSCTKEGEEVKKVVF

SEQ ID NO: 10385 - protein, 235 aa, Suaeda maritima
MAEERSVKLYGTWSSPYVLRVKLALKIKGIEYDYFEEDLANKSELLLQYNPVYKRVPVLVHNGLPISESSVILEYIDETWTDPPHLLPKDPYLRAKHRFWAAYLQQVAEMFGTSLVLKSQGKDIEDVVNEYWNKMDVAEELIRETFPYNEIPCFKDTIKPGYLDIILYSLVGTSDASEELFGFKPFIPERYPLLASWTKALSEVPEVKEVTPPKDKLIELLRTIRQMYLPSAPKA

SEQ ID NO: 10386 - protein, 385 aa, Phanerochaete chrysosporium
MNIWAPAPEPPTKLGRHRQLAPGCGLHVSPIQLGAMSIGDKWHPYGMGTMDKEASFKLLDAFYNAGGNFIDTANVYQDETSEEFIGEWMEARGNRDQMVVATKYSLVYKRGASFEEIPQKTQYVGNSLKSMHISVHDSLRKLRTSYIDIFYVHFWDYTCTIEEVMNGLHNLVAQGKVLYLGVSDTPAWVVSKANNYARMAGKTPFVIYEGEWNITMRDMERDIIPMCIHEGMAIAPWNVLCAGKIRTDAEEERRLKSGEGGRTLLQFDGWLRNETERKVSKALEKVAEEIGAKSITSVAIAYLMQKFPYVFPIVGGRKVEHLYANLEALDISLSPEQMQFLNDTVPFNKGFPYLLFGDGSDYNIVHKAAGHYDKWPAQQAIRPQK

SEQ ID NO: 10387 - protein, 751 aa, Geobacillus stearothermophilus
MENQNRQNAAQCPFHGSVTNQSSNRTTNKDWWPNQLNLSILHQHDRKTNPHDEEFNYAEEFQKLDYWALKEDLRKLMTESQDWWPADYGHYGPLFIRMAWHSAGTYRTGDGRGGASTGTQRFAPLNSWPNNANLDKARRLLWPIKKKYGNKISWADLFILAGNVAIESMGGKTIGFGGGRVDVWHPEEDVYWGSEKEWLASERYSGDRELENPLAAVQMGLTYVNPEGPDGKPDPKAAARDIRETFRRMGMNDEETVALIAGGHTFGKAHGAGPATHVGPEPEAAPIEAQGLGWISSYGKGKGSDTITSGIEGAWTPTPTQWDTSYFDMLFGYDWWLTKSPAGAWQWMAVDPDEKDLAPDAEDPSKKVPTMMMTTDLALRFDPEYEKIARRFHQNPEEFAEAFARAWFKLTHRDMGPKTRYLGPEVPKEDFIWQDPIPEVDYELTEAEIEEIKAKILNSGLTVSELVKTAWASASTFRNSDKRGGANGARIRLAPQKDWEVNEPERLAKVLSVYEDIQRELPKKVSIADLIVLGGSAAVEKAARDAGFDVKVPFFPGRGDATQEQTDVESFAVLEPFADGFRNYQKQEYSVPPEELLVDKAQLLGLTAPEMTVLVGGLRVLGANYRDLPHGVFTDRIGVLTNDFFVNLLDMNYEWVPTDSGIYEIRDRKTGEVRWTATRVDLIFGSNSILRSYAEFYAQDDNQEKFVRDFINAWVKVMNADRFDLVKKARESVTALQTNTPCRSGNNMNLQ

SEQ ID NO: 10388 - protein, 140 aa, Triticum aestivum
MASLMTKKEIGQTHDVLRFGVNDSVRGDLAPPHPVQATIHKETKFWDEKKRFGTEAIYGSAFNIRKDLDAQILSRFQRPPGALPSSMLGYEAMTGSLDDFGFEDYLNLPQDSDSLRIPDMHHGMEVRLGLSKGPVCPSFS

SEQ ID NO: 10389 - protein, 440 aa, Brassica rapa
IFSFLLVFVLLILFHPVLSIYINTLSSTESLTISGNRTLASPGDDFELGFFKTISRSRWYLGIWYKKISQRTYVWVANRDSPLFNAVGTLKISGNNLVILGDSNNSVWSTNHTRGNERSPVVAELLANGNFVIRYSNNNDASGFLWQSFDYPTDTLLPEMKLGYDLKKGMNRFLTSWRNSDDPSSGNIKYQLDTQRGMPEFYLLKEGSRAHRSGPWNGVQFYGIPEDQKLSYMAYNFIENSEEVAYTFRMTNNSIYSRLKINSDEYLDRLTWTPTSTAWNLFWSAPVDIRCDVYMACGPDAYCDVSTSPVCNCIQGFKRSDEQQWDLRDPSSGCIRGTPLSCKGDGFTRMKKMKLPETRMAIVDRSIGVKECEKRCLSDCNCTAFANADIRNGGTGCVIWTRELEDIRTYSAADLGQDLYVRLAAADLVKTRNENGKIIT

SEQ ID NO: 10390 - protein, 463 aa, Oryza sativa; identical to SEQ ID NO: 7203

SEQ ID NO: 10391 - protein, 186 aa, Thermoplasma volcanium
MTKVLIITGDAGESLEVMYPYQRLLEEGYEVDIAAPSAKYVQTVVHDFVPGFDTYTEKPGYLVKANKAFKDVNPEEYAAIVIPGGRAPEYIRNDPDVQRIVKYFFNKDAPVAELCHAPLILGSAGLLKGRKTAAYPALKSDVEIAGGTFIDEGAVVDRNIVSARAWPDHPSWMREFMKILKTKYPP

SEQ ID NO: 10392 - protein, 329 aa, Enterococcus faecalis V583
MSILVLGGAGYIGSHAVDQLISKGYAVVVVDNLLTGHRSAVHEQATFYEGDIRDKAFLRSVFEKESIEGVLHFAANSLVGESVEKPLMYFNNNVHGTQIALEVMQEFGVKHIVFSSTAATYGEPKAMPITEETPTNPKNPYGESKLMMEKIMKWCDNAYEMKYVALRYFNVAGAKKDASIGEDHTPETHIVPIILQVALGQRAELSIFGDDYDTPDGTCIRDYVYIEDLIAAHILALEYLKNGGESDVFNLGSNNGYSVKEMLDAAREVTGQEIPATIAPRRAGDPSTLIASSEKAKRVLGWQPEVTEVKDIIATAWQWHVKHPQGYNE

SEQ ID NO: 10393 - protein, 96 aa, Oryza sativa
  unsure (1)..(96): unsure at all Xaa locations
KTSPFRSARIVASSARLQIHLTDPVIQLVLPFGYFEEFRLPMSHRPTENLDTEVLEQASVDTQLTSSNVXLQKMGWKGKXGFGKQVAELVEVARAG

SEQ ID NO: 10394 - protein, 440 aa, Pseudomonas aeruginosa UCBPP-PA14
MGFWTCSALVIGNMVGSGVFLLPSSLAAFGGLSLFGWLVSSTGAVLLALTFARLARVNPGAGGPYAYTRDGFGSFAGYLCAWTYWKAAWIGNAAIAVTLVGYLRVFIPALADPLLMVCVAIAAIWLCTLINLRGIGTFSVVQNLLTILKLLPLLLVGILGWFHFNPEHLAIPARSELPNMGYAQAIATTAALTLWSFIGLESATVPADDVEDPRRTIPRATLFGTLAAAALYILSITAVQGLMPPEVLARSTSPFADAARILMGDWGYYLVAAGAVIACLGALNGWVLLQGQIPVAPARDGLFPESLGQLNKNGAPAHGLLASGLLVTALVMVDGHGDLVDVFNVIILLGTMTGVVPYAFCTAALLQLLAVRPDEFSPRSRRQLLVIGSLGFAYSLWALYGTGQQAIFWGFLVLMAGIPMYTWRQWRNQVNGVPTLKAND

SEQ ID NO: 10395 - protein, 816 aa, Brassica rapa
MKGVQNIYNNAYSVSSLLVFFVLILFRPALSISAANRLSSSESLTISSNRTLVSPGGAFELGFFKPSALPRWYLGIRYKKVSEKTYAWVANRNNPLFTSIGTLKISGNNLHLLDQSNNTVWWTSSPSGDVTAPVIAELLSNGNFVLRHSDNNDDPSSFLWQSFDFPTDTLLPEMKLGIDHKKERNWILTSWRAADDPASGNFTFNLETQWGLPEFILRSDGRVAARSGPWDGIEFSGIPEMQRSDNIISNFTVNSGEAAYSFRMTNHSIYSILTARDWMLVRVTWTSTSLEWKRSEDNLFTDICDVYHVCYGPNTYCDINTSPRCNCIRGFVPQNATEWAERDEVLGRSISGCVRKTQLNCEEYHDFVLLNNTKLPDTKTATVDQGIIDEKICKERCLSDCNCTSFAFGKNGLGCVTWTGDLVDIRTYFEGGYALFVKVSADDPDFSSGEKRDRTGKTIGWSIGGVSVLLLLSVILFCFWKRRQKQAKADATPIEGNQVQLNEMVLRNINSSREDEIEDLDLPLMDFEAVVAATERFSHSNQVGKGGFGAVYKGRLSDGQEIAVKRLSAMSAQGTDEFLNEVRLIARLQHVNLVRLLGCCVQANEKILIYEYLENLSLDSHIFDKTRSSMLNWQMRFDIINGIARGLLYLHQDSRFRIIHRDLKASNVLLDKDMAPKISDFGLARMFGRDETEANTRKVVGTYGYMSPEYAMNGTFSMKSDVFSFGVLLLEIISGKRNKGFCDSDSNLNLLGHVWRNWNEGQGLEIVDTAVIVDSSSPTCRPREILRCLQIGLLCVQEHVEDRPMIDVVSSFDARK

SEQ ID NO: 10396 - protein, 67 aa, Glycine max
HFFFFFVVTLQQPGYDIIAQFMIGYVLPGKPIANLLFKIYGRISTVHARSFLSDLKLGHYMKIPPRC

SEQ ID NO: 10397 - protein, 98 aa, Glycine max
MKKEDTVKLISAEGFELVVDKEAAMVSQTIHNMLTSPGSFAERQHGEVTFPEISTTILEKICQYFYWHLQFASGKETEFPIEPELTLELMMAANYLHT

SEQ ID NO: 10398 - protein, 153 aa, Glycine max
  unsure (1)..(153): unsure at all Xaa locations
MVKAVAVLGSREGVTGTIFFNQEGNGPTTVTGXSLAGLKPGLHGFHVHALGDTTNGCLSTGSHFNPNNKEHGAPEDENRHAGDLGNVNVGDDGTVSFTITDSQIPLTGPNTIIGRAVVVHADPDDLGKGGHELSKTTGNAGGRVACGKYRLQY

SEQ ID NO: 10399 - protein, 506 aa, Cytophaga hutchinsonii
MSKQNYDSKFCGSLPISFVNQIQDYGFLLVCDPALIVLQVSDNAEAFTRISYQSFIDKNLKELLTADSFQLLQEKLSSKAQKRFTCTLEFYGGVRTSFLTLIHVKEEYILFEFEPSDDTDIKGFREVYQQIHEASAAIQQSQELGESLSIAVKELKTFSGFDKVMIYKFDEDWNGHVLAEAMEPGMESYLGITFPASDIPKQARELYLKNPYRLIPDREYKPSKLYPVINPASSGFVDLGVCNLRGVIKVHLEYLTNMNVKSSMSTRILKDNTLWGLIACHHREKKFLNFDQCSVFEMFSNVVSTRLSALETEQNLTKTTENQALMNSIIEELYSQTMLINAIDNCAALIMQLLDCTGLVHIRESKVKSFGACPSASSIHELVIWLQMKNFTTLYATAALTEAYEDAAAIASVASGLLAFPVIPDKGEYILCFRAEILQRIDWGGNPNEAIRFNEDMKTYHPRHSFEIWKEEIKSTSQPFQEYEMNFAKELQRIFIETRLKEQNRR

SEQ ID NO: 10400 - protein, 102 aa, Clavispora lusitaniae
TDGFGFMLAFGDLAWLPWSYSLQARYLALPGNAYHLGWLKCSLILLVNVLGYYIFHSANQQKSDFKQGKLKHLKSITTPTGSKLLADGWWSTSQHINYFGDR

SEQ ID NO: 10401 - protein, 202 aa, Oryza sativa
  unsure (1)..(202): unsure at all Xaa locations
MAAPDVEYRCFVGGLAWATDDRSLEAAFSTYGEILDSKIINDRETGRSRGFGFVTFSSEQSMRDAIEGMNGKELDGRNITVNEAQSRRSGGGGGGYGGGGGGYGGGRGGGGYGGGGGGGYGRREXAATVAAAATVAAVAAATAATPAGTGGNDWWGPSWPVIXLAIRVRIILSSSRVVIVSSGSLESRSPLSIHPVLGVLRP

SEQ ID NO: 10402 - protein, 153 aa, Zea mays
  unsure (1)..(153): unsure at all Xaa locations
MGKGVAVLNSSEGVKGTIFFTQEGDGVTTVTGTVSGLKPGLHGFHVHALGDTTNGCMSTGPHFNPDGKQHGAPEDANRHAGDLGNIIVGDDGTATFXTITDCQIPLSGPNSIVGRAVVVHADPDDLGKGGHELSLATGNAGGRVACGIIGLQG

SEQ ID NO: 10403 - protein, 491 aa, Bifidobacterium longum NCC2705
MSTTDAPKKPRETDDVPVPATLRKSLKNRHIQLIALGGAIGTGLFYGSSESIALAGPSILLAYLVGGLAIFAIVRALSEMSVEDPKAGAFSYYATRYWSKRAGFISGWNYWFNYILVSMVELSVVGSFVNYWFPAIPTWVSAAVFLVIICAANLLGVSKFGEFEFWFAIIKIVAVIAMIIGGLAVIIFVLPTASGVRASFANWFTVGNGFFPNGLMGQNSDGSWTGLLMALVVVMFSFGGTELIGITAGETEDPKTTIPRATNDIIWRILVFYIGALGVIMAVVPWNTIDGKSSPFVQIFDSVGIHAAAGILNFVCLTAVMSVYNSGLYANSRMLYSLAKQGNAPAYLGKLNSRGVPVAGVLTSAAITAIAVVVVFVWPEFAFNYLMSIATIAGIINWTMIMLTEMKFRKVVAAGGAPEDSELAGLSGQEALDAIHFKLPFAKVTPWVVLAFLALVVVLMCFSTSYRIAVIAGVIWLAILFAAYQLTQAKK

SEQ ID NO: 10404 - protein, 867 aa, Piromyces sp. E2
MKIQNILVALTCGLVSQVFATSWSEADEKAKSFMSDLSESEKIDIVTGYMNMQGTCVGNIKPLDRKNFKGLCLQDGPAGVRFNGGTSTTWQAGINNAATFNKDLLYKIGKDQGAEFYAKGINIALAPSMNILRAPASGRVWENFGEDPYLSGVCGAQITKGYQDSGVIVAAKHYVANDIEHNREASSSNMDDQTLMEIHVEPFYRTIKDGDAGSVMASYNAVNNIYVVQNKKVLTEILKEGIGFQGFVMSDWWAIHDLEGSFNAGMDMNMPGGKAWGPDYVNNSFWGSNISNAIRSGQVSSSRLDDAVRRIIRTLYRFDQMSGYPNVNLKAPSMHADTNRQAAIESSVLLKNADDILPLTKKYRKIAIIGKDADKAQSCTDTACSGGNIIQGWGSGTTDFTGISDPITAIKNRASKEGISIVSSISDSANEGANVAKDADVAVVFVRATSGEEYIVVDNNKGDRNNLDLWHGGNDLVKSVAAVNKNTVVVIHAPATVNLPFLNNVKAIIHAGMPGAESGNAIASILFGDSNPSGHLPFTWAAREDYCCDVSYPAELPHGGNSKTAYDYKEGLFVGYRWFDKKNKTPIFPFGHGLSYTTFDYSNLSVSLKKSGTQVTGLEATVTVANTGSYEGATVPMLFLGFPAVSELGDYPVRNLKAFEKVNLKAGEKKTVTLTVDQHGLSYYNTSKKSFVVPTGGEFTVYVGKSAGDLPLKKAIKNTQGTNESSSSVGDENNNNPNNNADCSVNGYKCCSNSNAEVVYTDGDGNWGVENGQWCIIKEQQQQQTCFSIKLGYPCCKGNEVAYTDNDGQWGFENGQWCGIATATSGAGGCPYTSKNGYPVCQTTTKVEYVDSDKWGVENGNWCIMCN

SEQ ID NO: 10405 - protein, 445 aa, Salmonella enterica subsp. enterica serovar Typhi
MSSDADAHKVGLIPVTLMVSGNIMGSGVFLLPANLAATGGIAIYGWLVTIIGALALSMVYAKMSSLDPSPGGSYAYARRCFGPFLGYQTNVLYWLACWIGNIAMVVIGVGYLSYFFPILKDPLVLTLTCVAVLWIFVLLNIVGPKMITRVQAVATVLALVPIVGIAVFGWFWFKGETYMAAWNVSGMNTFGAIQSTLNVTLWSFIGVESASVAAGVVKNPKRNVPIATIGGVLIAAVCYVLSTTAIMGMIPNAALRVSASPFGDAARMALGDTAGAIVSFCAAAGCLGSLGGWTLLAGQTAKAAADDGLFPPIFARVNKAGTPVAGLLIVGVLMTIFQFSSMSPNAAKEFGLVSSVSVIFTLVPYLYTCAALLLLGHGHFGKARPLYLLITFVAFVYCIWAVIGSGAKEVMWSFVTLMVITALYALNYNRIHKNPYPLDAPVKQD

SEQ ID NO: 10406 - protein, 169 aa, Leavenworthia stylosa
NTERVGMIHDGESRFSIKGKPINHFLGTSTFSEYTVVHSGQVAKINPEAPLDKVCIVSCGLSTGLGATLNVAKPKKGQSVAVFGLGAVGLGAAEGARIAGASRIIGVDLNSNRFEQAKKFGVTEFVNPKEHDKPVQQVIAEMTNGGVDRSVECTGSVQAMIQAFECVHD

SEQ ID NO: 10407 - protein, 480 aa, Oryza sativa
  unsure (1)..(480): unsure at all Xaa locations
SSAVADVLSCAYAVLLSSIGSGRSWSRGISIVRDVRDSFGSLSRRSFEVRISGLPGLSGHHRGKSLGSLSELRDRPVVVDQSRWVGLPPELLRDVMKRLEEGESNWPSRKDVVACAAVCRTWREICKDIVQSPEICGKLTFPVSLKQPGPRDGLIQCFIKRDKSKLTYYLYLCLSPAVLSENGKFLLAAKRNRRATSTEXYIISVDSKNISRSSNGYVGKMRSNFLGTKFVVYDTQPPYNAGSLMSCQHGSRRISSRRVSPKLPTGSYPIAHVKYELNVLGTRGPRRMLCTMHSIPASAVDPEGVVPGQPEQLLPGPFEESFRSTNTSSRFSFMDRSLDFSSSRFSEISGSANQQGEDDIPEAKERPLVLRNKVPRWHEQLQCLCLNFRGPVTLGXSVKNFQLIAAAAFXSSQLEQQQNHASSSFWHSXHGKVILQFGKVAXDMSPLDYRXPFLTFQGFAICLTAFXTKPAWEYIHQPFL

SEQ ID NO: 10408 - protein, 198 aa, Salmonella enterica subsp. enterica serovar Typhi
MSYYAFEGLIPVVHPDAFVHPSAVLIGDVIVGAGVYIGPLASLRGDYGRLILEAGSNLQDGCIMHGYCDTDTIVHENGHIGHGAILHGCVVGRDALVGMNSVIMDGAVIGEESIVAAMSFVKAGFQGEARQLLVGSPARVLRQVTDQELYWKRLNTKEYQDLAIRCRTGLSETKPLTQVEENRPRLKGTTDVKPKSAQ

SEQ ID NO: 10409 - protein, 438 aa, Zea mays
MAGWCEEAVALLQRPAAAEMAVDVLLCAVPIWAAVMIGLVVGWSWRPRWTGLLFLGLRTRLRIIWLPPGLGARRLWFACTALSACSVAPRLLSSAFRRCRGKQQDKASPEDTAAVARDGGGCADGRTNFEGEHDTVTEKDLELLLQLLDNKESGDTAWQNLMERTTSNMTYKAWRREPEEGPIMYCSRTIFEDATPELVRDFFWDGDFRLKWDPMLAYSKSLDEFPQNGATIVHWIKKFPFFCSDREYIFGGRIWESGKTYYCVTKGVPYPSLPKKEKPRRVELYFSSWRIRAVQSPKHVGQQSACEVTLVHYEDMGIPKDVARVAVRHGMWGAVKKLQSGFRAYQQMRDTENTLSHSAIMARMTTRVSITASNGGLDHDLSIADKIGGENDSSHAVQHGFDWKWVVFGGAVAAVCVLNTGLVGKVLLLGAARRQAKK

SEQ ID NO: 10410 - protein, 121 aa, Glycine max
MAFSSTLLLLLVAMFVFSAVAQSPASSPEFAAAPPKTATPSPSSSMSPPAAAPSPSSSVVSSPPSPPTSVPASSPSPSISPSSISSPPSDAPAPSENAAVSNGFAAVGSVVVGLVAAASIM

SEQ ID NO: 10411 - protein, 244 aa, Gossypium hirsutum
MVYPNESLEDSPQKKMGRGKIEIKRIENTTNRQVTFCKRRNGLLKKAYELSVLCDAEVALVAFSSRGRLYEYANNSVKATIERYKKASDSSNTGSVAEVNAQFYQQEADKLRNQIRNLQNANRHMLGESIGGLPMKELKSLESRLEKGISRIRSKKNELLFAEIEYMQKREIDLHNNNQLLRAKIAENERKQQSMNLMPGGSSANFEALHSQPYDSRNYFQVDALQPATNYYNPQLQQDQIALH

SEQ ID NO: 10412 - protein, 827 aa, Brassica rapa
IYFNTLSSTETLTISSNRTLVSPGDVFELGFFRTNSSSGWYLGIWYKKVSYRTSVWVANRDSPLFNAIGTLKISSNNLVLRGQSNKSVWSTNLTRGNERFPVVAELLANGNFVIRYSNKNDASGFLWQSFDYPTDTLLPEMKLGYDLKTEQNRFLTSWRNSDDPSSGEISYFLDTESGMPEFYLLKSGLRAYRSGPWNGVRFSGIPGDQYLSYMVYNYTENSEEVAYTFRMTTHSIYSRLKISSKGFLERLTWTPTSIAWNLIWYLPVENQCDVYMVCGVYSYCDENTSPMCNCIQGFMPLNEQRWDLRDWSSGCTRRTRLSCSGDGFTRMRKMKLPETKMANVYRSIGVKECEKRCLSDCNCTAFANADIRNGGTGCVIWTGRLDDIRNYYADGQDLYVRLAAADLVKKRDANWKIISLIVGVSVVLLLMIMFCLWKKKQNRAKAMASSIVNHQRNQNVLMNTMTQSNKRQLSRENKIEEFELPLIELEAVVKATENFSNCNELGRSGFGIVYKGMLDGQEVAVKRLSKTSLQGIDEFMNEVRLIARLQHINLVRILGCCIEADEKILIYEYLENSSLDYFLFGKKRSSNLNWKDRFAITNGVARGLLYLHQDSRFRIIHRDLKPGNILLDKYMIPKISDFGMARIFARDETQARTDNAVGTYGYMSPEYAMDGVISEKTDVFSFGVIVLEIVSGKRNRGFYQVNPENNLPSYAWTHWAEGRALEIVDPVIVDSLSSLPSTFKPKEVLKCIQIGLLCIQERAEHRPTMSSVVWMLGSEATEIPQPKPPVYCLIASYYANNPSSSRQFDDDESWTVNKYTCSVIDAR

SEQ ID NO: 10413 - protein, 252 aa, Oryza sativa (japonica cultivar-group)
MSSLESARADLALLILYLNKAEARDKICRAIQYGSKFVSNGQPGPAQNVDKSTSLARKVFRLFKFVNDLHALISPPAKGTPLPLILLGKSKNALLSTFLFLDQIVWAGRTGIYKNKERAEFLSKIAFYCFLGSNTCTSIIEVAELQRLSKSMKKLEKELKHQELLKNEQYQMKLQKCNERRLALIKSSLDIVVAIGLLQLAPKKVTPRVTGAFGFASSLIACYQSCSQPQPNPSDPPEGVSVGSSNVATSKK

SEQ ID NO: 10414 - protein, 454 aa, Escherichia coli CFT073
MTMSHNVTPNTSRVELRKTLTLVPVVMMGLAYMQPMTLFDTFGIVSGLTDGHVPTAYAFALIAILFTALSYGKLVRRYPSAGSAYTYAQKSISPTVGFMVGWSSLLDYLFAPMINILLAKIYFEALVPSIPSWMFVVALVAFMTAFNLRSLKSVANFNTVIVVLQIVLIAVILGMVVYGVFEGEGAGTLASTRPFWSGDAHVIPMITGATILCFSFTGFDGISNLSEETKDAERVIPRAIFLTALIGGMIFIFATYFLQLYFPDISRFKDPDASQPEIMLYVAGKAFQVGALIFSTITVLASGMAAHAGVARLMYVMGRDGVFPKSFFGYVHPKWRTPAMNIILVGAIALLAINFDLVMATALINFGALVAFTFVNLSVISQFWIREKRNKTLKDHFQYLFLPMCGALTVGALWVNLEESSMVLGLIWAAIGLIYLACVTKSFRNPVPQYEDVA

SEQ ID NO: 10415 - protein, 561 aa, Oryza sativa
  unsure (1)..(561): unsure at all Xaa locations
MRRLLLLPLLVLAGAAVGGGVVPVAARSAFACXXAGGPAATLPFCRRSLPARARARDLVARLTRAEKVRLLVNNAAGVPRLGVAGYEWWSEALHGVSDTGPGVRFGGAFPGATAFPQVIGTAASFNATLWELIGQAVSDEGRAMYNGGQAGLTFWSPNVNIFRDPRWGRGQETPGEDPAVAARYAAAYVRGLQQQQPSSGRLKLAACCKHFTAYDLDNWSGTDRFHFNAVVTRQDLEDTFNVPFRSCVVDGRAASVMCSYNQVNGVPTCADAAFLRGTIRRRWGLAGYIVSDCDSVDVFYSDQHYTRTREDAVAATLRAGLDLDCGPFLAQYTEGAVAQGKVGDGDIDAAVTNTVTVQMRLGMFDGDPAAQPFGHLGPQHVCTAAHQELAVEAARQGIVLLKNDGRALPLSPATARRAVAVVGPHAEATVAMIGNYAGKPCRYTTPLQGVARYAARAAHQPGCTDVACAGSGQPIAAAVDAARRADATIVVAGLDQKIEAEGLDRASLLLPGRQAELISSVAKASKGPNDPKIAGILWAGYPGQAGGQAIADVIFGHHNPX

SEQ ID NO: 10416 - protein, 493 aa, Zea mays
  unsure (1)..(493): unsure at all Xaa locations
MAAPASSKAPATSDSDFEGLATGLRALRARMDSAAFLGFVVARRKEADALRAEMPSALKLCVRSGQFVMDAVAVDRREGRPRXPRNLAHPWACVLILASGQGRPPNPCPRSPPGHPRARPRVVPRAARDRARGMARDWKEAAEKKGGVEGAKPPDAHAFLQLVATFAVAEREDRPLYRRIVVSFSWRRQMPRLALTLGLEEQMADIIEELIAKRQQLDAVNFAYEAGLQEKFPPVPLLKSYLEDSKKTSTAASDNSSTSSGQSGSNVNKKEQSALRAVIKCVEDRKLEAEFPLEGLRKQLEELEKAKTEKKKAASSATSGGSGGPATKRIRASTGGPMPPAKAGRLTNNACVSSLPAPTTLTQSPSHASYANTSPSRTSYANTSPSHASYATVSPTHASYATPSPPHASYATASPYPYDRPVGHGVYCTRSPPVIREPYVYPAEEVATVNVGIPMAYSTPPMSYPAAPYGGYGNGMPAYTNGMAPAFHQAYYR

SEQ ID NO: 10417 - protein, 342 aa, Glycine max
MADLKSTFLNVYSVLKSELLHDPAFEFSDDARHWVDRMLDYNVPGGKLNRGLSVIDSYRLLKEGQALNDDEIFLASALGWCIEWLQAYFLVLDDIMDNSHTRRGQPCWFRVPKVGMIAANDGVLLRNHIPRILRKHFRGKPYYIDLLDLFNEVEFQTASGQMIDLITTLEGEKDLSKYTLTLHRRIVQYKTAYYSFYLPVACALLMAGEDLDKNVDVKNILVEMGTYFQVQDDYLDCFGDPQTIGKIGTDIEDFKCSWLIVKALELSNEQQKKVLQENYGKPDPENVAKVKALYNELNLQGVFEEYESGSYAKLVSSIEAHPIKAVQAVLKSFLAKIYKRQK

SEQ ID NO: 10418 - protein, 267 aa, Arabidopsis thaliana
MSSSTMYRGVNMFSPANTNWIFQEVREATWTAEENKRFEKALAYLDDKDNLESWSKIADLIPGKTVADVIKRYKELEDDVSDIEAGLIPIPGYGGDASSAANSDYFFGLENSSYGYDYVVGGKRSSPAMTDCFRSPMPEKERKKGVPWTEDEHLRFLMGLKKYGKGDWRNIAKSFVTTRTPTQVASHAQKYFLRQLTDGKDKRRSSIHDITTVNIPDADASATATTADVALSPTPANSFDVFLQPNPHYSFASASASSYYNAFPQWS

SEQ ID NO: 10419 - protein, 202 aa, Escherichia coli O157:H7
MMMIGEGAENFAFAHGMERVSPEIFSTPLRYEQLMAAREEGATVLDHSGAPLDEKQKMGTVGAVALDLDGNLAAATSTGGMTNKLPGRVGDSPLVGAGCYANNASVAVSCTGTGEVFIRALAAYDIAALMDYGGLSLAEACERVVMEKLPALGGSGGLIAIDHEGNVALPFNTEGMYRAWGYAGDTPTTGIYREKGDTVATQ

SEQ ID NO: 10420 - protein, 451 aa, Oryza sativa (japonica cultivar-group)
MAQAVVPAMQCQVGAVRARPAAAAAAAGGRVWGVRRTGRGTSGFRVMAVSTETTGVVTRMEQLLNMDTTPFTDKIIAEYIWVGGTGIDLRSKSRTISKPVEDPSELPKWNYDGSSTGQAPGEDSEVILYPQAIFKDPFRGGNNILVMCDTYTPAGEPIPTNKRNRAAQVFSDPKVVSQVPWFGIEQEYTLLQRDVNWPLGWPVGGYPGPQGPYYCAVGSDKSFGRDISDAHYKACLYAGINISGTNGEVMPGQWEYQVGPSVGIEAGDHIWISRYILERITEQAGVVLTLDPKPIQADSVICFVIRLRLILQITKSMREDGGFEVIKKAILNLSLRHDLHISAYGEGNERRLTGLHETASIDNFSWGVANRGCSIRVGRDTEAKGKGYLEDRRPASNMDPYVVTALLAETTILWEPTLEAEVLAAKKLALKFLENHATFHSPVNILVEHHT

SEQ ID NO: 10421 - protein, 245 aa, Corynocarpus laevigatus
ALSIAGAVQSQKLAVCAISQLQSLPGGDIKLLCDTVVESVRELTGYDRVMVYKFHEDEHGEVVAESKRADLDLYIGLHYPATDIPQASRFLFKQNRVRMIVNCHASSVRVIQDEELRQPLCLVGSTLRAPHGCHAQYMANMGSIASLAMAVVINGTDEEGTGGRNSMRLWGLVACHHTSARCIPFPLRYACEFLMQAFGLQLNMELQLALQLSEKHVLRTQTLLCDMLLRDSPTGIVTQSPSIMD

SEQ ID NO: 10422 - protein, 347 aa, Novosphingobium aromaticivorans
MAGTAKMRLARVHGPGDVRLDEVPVPHCGPGEALVQVAACGVCGSDLGYIAQGGLGGVEPLSAPLPIGHEFAGTVVAVGQCVTSVAPGMRVAVNPDRAYIGGGGPDGAMAAFIRVAGAEIGETLFPLPDHLPFAEASLAEPLSVGLHGLRVAGAKTEDRIAILGAGPIGLCALVMARHLGARDVAIFDRVPERLERARALGAGLAVDVTQESLTEALARFHGSGERFGAKFVGTDVFVDCAGSAAALEEVVAVAKYRARIAVVALHHKPLALDLWRMMANEISLAGSIADARSEEFGEAVAMLAAGGQALSPLISHRFDFSRFHEALAVAADGARAAKVILTFPEAA

SEQ ID NO: 10423 - protein, 3487 aa, Microcystis aeruginosa
MVESIDYKKLMATTLSKMEVMQARINELETRQSESIAVVGMACRFPGGINSPEKYWSFCQAGLDAIVEVPKSRWDISKLYSQKPTLGKMNTAYGGFLQENITEFDARFFSISAKEAASMDPQQRLLLEVAWEALENANLPLKNLADNKVGVFVGITSIDHALKVYGTNYDQIDSFFGSGNALSAAAGRLSYFLNLHGPCLSIDTACASSLVAVHQGIRSLRNRECELALVGGVNLILEPAITISLSQSGMMSPDGRCKTFDASANGYVRGEGCGVLILKTLSEAQKNGDHILALLRGSAVNHNGAAAGLTVPSGPAQQELLRQALADARIVPEDVSYIEAHGTGTSLGDPIELNAIASVYGKRSDPLYVASVKTNIGHLEAAAGMAGIIKTILILQQGEIPPHLHFQSPNPLINWQDHPIEIPTQNIPWPNNNKVPIAGVSSFGFSGTNAHVIVQQAPVSKISEIQQQIPSHLLTLSAHNKTALKELAKRFHTLLESHPEIGDICYSAAVGRIDLPERLAIVGDTCPELQQRLAAFAEENPLDDLTFYQRFTSEKSPKIVFLFTGQGACYPGMGHQLYQTQPTFRQYIDQCAEILSKYLDHPLTEILFGEQTDLLNQTAYAQPAIFALEYSLTMLWKSWGITPTLLIGHSVGEYVAACIAGVFSLEAGLALVVKRGQLMQTTTSGKMASIFADEETVIYLIKNYTQTVSIAAINHPQQIVIAGESASIEEVISTCKKQKIPAQYLPVTQAFHSPLMEPILKEFEKEARQISYQRPQILLLSGLDGEVLENAPDATYWSKQCREPVRFLSSLITAFNKGYNLFLEVGPRPILAEQGRRYKDEVIWLSSLNRGLDNWQTILSALAQLYLNGAPFNPEQFNQNYGYKKVRLPNYPFQRKPFQFQPNPRTENQSIDKIFLDSQTSNLTDTETTVFNMQKHQQEIRNQLKSILALLLKEDENDLPEDETLLNLGADSIILTDFSRKVEEKFQVKVKIDQLFTDLQTLVDIAEYLCQFVKEKPLENTSEITTKVIDDETELSNYLQVIEQLQPIATAYIIKALESLGKKLNQGEQWTIENLRQTLPVARKYHILLNRYLQDLEEANILHNQGNIWTVKNLPESFSLPQALQKLEKTCPSAKPELEMLQRCGENLAEVLKGNIDPLTLIFPEGSVAHAESIYGNSPVSRLMNQRVAQAINQILTNFSNSDHPYQILEIGGGTGATSEAILNHLNLDHITYSFSEASPFLLHQARQKFQKKYNLNFHQLDIEKSPISQGIPARNYHIVVAANVLHATRNITETLTHIRELLRPGGYLVLLETVENNSWLNLTFGLTPGWWRFQDQQLRSDTPLLRGENWCSVLKSCGFATANSFSKQNNIPINNGQELILACVPDEPLSIPSIPKFTVFGESSGKEALMMAQLQSLKDLKDLHEKTIIKQLEVLQTATVSPSIAPEILTNQTQIIPTQSSKTETYLPVSQEKPKSPEKPSSPNLNPLALKLTENKSLTEQQQAFIQNLQSIYNQKTAKSKAYSQNSRKTMVDVKPTIDFRMALKEFQYPIVSESAQGAYFKDIDGNNYIDLAMGFGVNFFGHSPDFVIEAVQEQMNRGIGLGMQSNLAAETAALISEMGRVERVAFSNTGTEAIMAAVRIARSRTKRQKIVMFAGSYHGTFDGILARVGEDKTTTQPLSLGTPLGMVEDIIVLSYGVEESLDIIATHADDLAAVLVEPVQSRKPDLQPQEFLQKLRQITHKKGITLIFDEIITGFRIAPGGAQEWFNVEADIVIYGKAIGGGLPISMICGKADFLDTVDGGFWQYGDDSHPQTELTAFGGTFCRHPLALAACRAVLLHLRENSPTIQEKVNQLTHRLATEVNQFFQEIGIPIRVVNFGSLFRFEPFGAYSIFLQPIELPLFYYLLNLKGIYTWEKRVCFLSTCHTNEDIDRVIVAVKEAITELQQAGFFANAKRPQVKKEEKKPLSEDEDGRGHLPSLNQSFPTSEAQRQLWLLAELDRNASASYNVTTSLELLGSLDVYILEKTINQVINRHEALRTKIIEQGELQEVVNEVNIKLNLIDFKDEDNPEATALALRSQFSQKPFDLSIAPLFAVILMRLKSDHYLLSLKTHHIVADGWSLGLILQEIGQLYSSQNNTTKEVLTPPMQFRQYLTLRAQETQSPQMLEHRDFWLKTYQEELPTFELATDFPRPAVKTYTGGQESQVIPSEVGQNLQKVGRKNKATLFMTMFAAYTAFLRRISGHKDLVIGIPISGRQIEGSDNLVGFCSQFLPLRIQVDATTSFIEHLQHTKQTLIDAFRHQSYTLEDLLAALQLPRDFSRSPLISVSFNMDPSLTLPEFKDLKVSLPPSPIGYTPFDLGFNLIELNDNLIIYCNYNTELFKKETIKQFIESFEILLRGIIDDANHLLYQLPLLTPVQQEKLLRQLTGKTRKLPEKATIIDDFIAQVKLTPNTPALIAGKISLSYQELNEKVNRLTHYLQQEYQLGVGKVIGVMLQRNHYLIIGILATFKTGATYVPIDSQYPHSRIEFILKDSGCHVCLTESNFISKLPEKMEKICLDKIDPIVEKYDKDEPKIFRNSSQTAYIFYTSGSTGNPKGVMGRHISILNVIQSLRLTFDLDKHPEWRYIFTAAVTHDPSIRNIFLPLTIGASLYMYEIKYIGHLVSFLQENQINALHTTPSIYREILGLLEPGETISSLKYISVGGEKLDRETALALRKRFPAEIISNVYGSTETCVGVSQYEIKENLDSEIPLGQVFHNNRLGVLDEFNNPVPLHVIGEICVEGAALASGYHNQPEMTQEKFKPSFLDETKTLFRTGDLGKQTAPGIIEFMGRKDNQVKVNGYRIDPGEIEYQLTRYAPIERAIVLPVQVNNQTQLSAYCQTDKTLEIAEIRELLAKFLPVYMIPSYFIFLKQFPLTRHGKLDLHSLRELRETGKSLVNSNYVAPRNYLESNLVSIWEKILSKHPIGIFDNFFEIGGHSLLLSRVVTRVHKELNVSVKLADFFKVPTIAGLATLISQTQYNYQEPISAIPPQKSYPMSHGQRRLWALEFLDQNHNAYGMPSAYQFKGNLNIDAFENAFQQLIQRHEILRTTFTLINNQPRQVVHNQMNFVIKQIDLTAYVSTEQENLIEESISHNAKTTFDLEVGPLLKVNLLKLSQENYIVLFNMHHIIFDGWSAGVLIKDFLTHYHAYGQENSQLMPPLRIHYKDYTSWQESQLETLKLQSQRDYWLAKLTPVPVRLNLPVDYPRPPVKSFQGNTITWQPEPELIDTFEKLVKAQEASLFMGLVSLVKSFLFRYTEQNEITIGSAIAGRNHPDLEDQIGFYVNTLVLRDQITDHDSFTDVLSKVKTTTLEAYDHQDYPFDQIVSDLNLQRDPSRNALFDVAIVLQNNQNVDLALDGITVNSIDPKMITAKFDLEFIFVEEEELYLKLIYNTDIFIHERILLLIDLFKNWLEQVLKFAHEPLINLSLASSENLIQEGQDMFTEDFNF

SEQ ID NO: 10424 - protein, 751 aa, Geobacillus stearothermophilus
MENQNRQNAAQCPFHGSVTNQSSNRTTNKDWWPNQLNLSILHQHDRKTNPHDEEFNYAEEFQKLDYWALKEDLRKLMTESQDWWPADYGHYGPLFIRMAWHSAGTYRIGDGRGGASTGTQRFAPLNSWPDNANLDKARRLLWPIKKKYGNKISWADLFILAGNVAIESMGGKTIGFGGGRVDVWHPEEDVYWGSEKEWLASERYSGDRELENPLAAVQMGLIYVNPEGPDGKPDPKAAARDIRETFRRMGMNDEETVALIAGGHTFGKAHGAGPATHVGPEPEAAPIEAQGLGWISSYGKGKGSDTITSGIEGAWTPTPTQWDTSYFDMLFGYDWWLTKSPAGAWQWMAVDPDEKDLAPDAEDPSKKVPTMMMTTDLALRFDPEYEKIARRFHQNPEEFAEAFARAWFKLTHRDMGPKTRYLGPEVPKEDFIWQDPIPEVDYELTEAEIEEIKAKILNSGLTVSELVKTAWASASTFRNSDKRGGANGARIRLAPQKDWEVNEPERLAKVLSVYEDIQRELPKKVSIADLIVLGGSAAVEKAARDAGFDVKVPFFPGRGDATQEQTDVESFAVLEPFADGFRNYQKQEYSVPPEELLVDKAQLLGLTAPEMTVLVGGLRVLGANYRDLPHGVFTDRIGVLTNDFFVNLLDMNYEWVPTDSGIYEIRDRKTGEVRWTATRVDLIFGSNSILRSYAEFYAQDDNQEKFVRDFINAWVKVMNADRFDLVKKARESVTALQGIASNRSINNKGLQ

SEQ ID NO: 10425 - protein, 184 aa, Oenococcus oeni MCW
MKIAFQTAAKRNHHVTLVDKANVLATSKLWRRIANQVAKEFPEISFDSCYVDAAAMKIISAPEKFDVIVTENLFGDILSDEASQITGSLGTIPSISRGDHGPALYEPIHGSAPDIAGKGIANPLSMINSVAMMLDHSFNRKDLAKRITDSVNKTIEGGTTTPDLGGNSKTTVVTNAIIKRIEEN

SEQ ID NO: 10426 - protein, 309 aa, Zea mays
MDAAAAAAAPSLNGKMGAEERKAQKSYWEEHSKNLTVEAMMLDSRAADLDKEERPEVLSLLPSYEGKSVLELGAGIGRFTGELAKTAGNVLALDFIESAIKKNESINGHYKNASFMCADVTSQDLVLQANSIDLIFSNWLLMYLSDEEVDQLVERMVKWLKVGGYIFFRESCFHQSGDTERKFNPTHYREPRFYTKVFKECQTFNQDGTSFKLSLITFKCIGAYVNIKKDQNQICWLWKKVNSSEDGGFQSFLDNVQYKATGILRYERIFGDGYVSTGGAETTKEFVEKLNLKPGQKVLDVGCGIGGGD

SEQ ID NO: 10427 - protein, 152 aa, Triticum aestivum
  unsure (1)..(152): unsure at all Xaa locations
LTSIYLINGAGGGCGDKQKKCCPLRRSRKGCMKGQGXPGHQQCPFRGVRQRTWGKXWVAEIREPNRGARLWLGTFATALDAARAYDAAARALYGDCARLNLSASPSQMQHPPAQGSGANGNSAPGTPCCSSNNSDSSASTPTGTPTDMDCSA

SEQ ID NO: 10428 - protein, 391 aa, Daucus carota
MGKHSAFSVFLFSILVAHSHVSASSQTCDFPAIFNFGDANSDTGAFAAWFFGNPPFFGQSYFNGSAGRVSDGRLLIDFMATDLGLPFLHPYMDSLGANFSHGANFANILSTIALPTSNIIPGVRPPRGLNPVNLDIQVAQFAQFVNRSQTQGEAFDNFMPKQDYFSQALYTLDIGQIDITQEFLTNKTDDEIKAVVPGLISSLSSNIQILYSLGGRSFWIHNLGPNGCLPILLTLAPVPDDQLDSAGCAKRYNDLTQYFNSELKKGVDQLRTDLPLAAVTYVDVYTAKYSLYQEPAKYGFTHPLETCCGFGGRYNYGEFSLCGSTITVNGTQLTVGPCENPAEYINYEGQTYTQAADQITFNKISTGELSDPPNSLKTACPKLSLPRVSDI

SEQ ID NO: 10429 - protein, 287 aa, Triticum sp.
MVMAAAERRDAEAELNLPPGFRFHPTDEELVADYLCARAAGRAPPVPIIAELDLYRFDPWELPERALFGAREWYFFTPRDRKYPNGSRPNRAAGGGYWKATGADRPVARAGRTVGIKKALVFYHGRPSAGVKTDWIMHEYRLAGADGRAAKNGGTLRLDEWVLCRLYNKKNQWEKMQRQRQEEEAAAKAAASQSVSWGETRTPESDVDNDPFPELDSLPEFQTANASILPKEEVQELGNDDWLMGISLDDLQGPGSLMLPWDDSYAASFLSPVATMKMEQDVSPFFF

SEQ ID NO: 10430 - protein, 487 aa, Zea mays
MAFASSNAKQSLYPDVDQSHPDLNTPFFSAPTTSTCAGAGAATGNSLYPTVDPNELAQNLFPETVEEDAAPPPPTTEETIIAVPGAQLHLIDPDRSVDLGAGTLSIVRLRQGDHSVAVLARLIHEKPHHRRGLFRLFSSGRSDAGAEQEPVQWPLARDVAAVKLDPAHYFFSLHVPHTDHPDDKDDADGAEADAEAALSYGLTVVGKGQEEVLAELDRVLEEYTTFSVKQVETAAKEKSEVMDARAVAEITPEEAVGDKKEVVEEKSAAFWTTIAPNVDDYSSSVARLIARGSGQLVRGIIWCGDITAGGLRRGEEVMKKSVGPSTKPTQVKPSTLRRMKRARRVTKMSNRVANSILSGVLKVTGFVTSTVLNSKPAQKFFKLMPGEVILASLDGFGKIWDAVEVSGKNVMQTSSVVTTSVVTHRYGEQAGEATHNYLHATGNVLGAAWAVFKIRKALDPKGNMKKSFVSQAAHAVAKESVARQKKK

SEQ ID NO: 10431 - protein, 175 aa, Zea mays
  unsure (1)..(175): unsure at all Xaa locations
MEINLVNLCIRWPWLIFIRLVIHVLLFSQDSSVPSSIGMPTRXRIPILYTLSWPDRIYCSEVTWPRLDLCKLGSLTFKAPDNVKYPSMDLAYAAGRAGGTMTGVLSAANEKAVELFIDEKISYLDIFKVVELTCDAHRNELVASPSLEEIIHYDLWARRHAASLQPASGLSPVPA

SEQ ID NO: 10432 - protein, 220 aa, Oryza sativa
  unsure (1)..(220): unsure at all Xaa locations
DSQLSPAVRPSKEGEPWWEPPPGHRPRRARRRSALSTTTSSSRASSRQPEGTFVKFLCSYGGRILPRHADGALRYVGGDNRVVSVDRSLPFHELQRKLREMCXVGXXVCLRCQLPTEDLDALVSVTGDDDLANLLEEYDAASRDRLQPLKIRAFLFPRTTTXXTPPPPSRTVPHALYHRQTGSAPSCASRWAAHQMSSPPAPSSSITTGTAARRGRTGTX

SEQ ID NO: 10433 - protein, 380 aa, Phanerochaete chrysosporium
MSKRTFKIVILPGDGIGPEVVAEATRVLEVVSASSSDVEIKLETHDFGGCSIDKHGEPLTAATLEACKLADAILLGAIGGPKWGVNSKVRPEQALLALRKALGLYANIRPANFASDSLLAYSPLKPSVARGVDIIVIRELIGGAYFGERKELGARAQEDAAWDTMIYSVPEVQRITRSRRQVASPDPPLPVHSIDKANVLASSRLWRKVATETIQNEFPQLKLDHHLVDSASMLIVANPKKLNGVILTENLFGDILSDESSVIPGSLGLLPSASLAARPLWPNTAHRRSSPRRVYEPIHGSAPDIAGQGIANPIGTILSAAMLCGTRSVWRSPAKAIEAAVEGARRQGDRREGLRTADLGGSSKTKDIGHKVVEILKATL

SEQ ID NO: 10434 - protein, 341 aa, Raphanus sativus
MKGVQNIYHYSYTLSILLVFLVLILFHPALSIYVNTMSSSESLTISSNRTLVSSGGVFELGFFKPSGLSRWYLGIWYKKVSEKTYAWVANRDNPLSNSIGTFKISGNNLVLLGQSNNTVWSTNRTRGNARSSVIAELLPNGNFVMRYSNNKDSSGFLWQSFDFPTDTLLPEMKLGYNFKTGRNRVPYIWRSYDDPSTGIFAYKLDIRRGLPEFILINQFLNQRVEMQRSGPWNGMEFSGIPEVQGLNYMVYNYTENSEEISYSFHMTNQSIYSRLTVSDYTLDRFTWIPPSSAWNLFWSLPTDVCDPLYSCGSYSYCDLNTSPNCNCIRGFVPKNRQQWDL

SEQ ID NO: 10435 - protein, 407 aa, Triticum aestivum
  unsure (1)..(407): unsure at all Xaa locations
MATDAGAADRSSVFRKLRAKSDNKMCFDCNAKNPTWASVTYGVFLCIDCSAVHRSLGVHVSFVRSTNLDSWTPEQLKMMVYGGNNRAQAFFKQHGWTDGGKIEAKYTSRAADLYRQXLLLKEVSKSSTEDGNNSGPPSPVAASQTSSQAAAFPDFKLVEVPKEVVNEKNEPESETIRSPKAPTHSFKKPIGGKKPGSKTGGLGARKLTTKPSESLYEQKPEEPAPALPSVAESTTARSKSHTSRFEYVENVPSAGSSSAENQAFGHVAPPKSSNFFXGEYGMDSGYHKKSTSGASKMQVEESSEARQKFSNAKSISSSQFFGDQANLEKEGQISLQKFSGSSAISSADLFGQQANNSNADLSASDLINRISFQATQDLTSLKSMAGQTGKKLTSMASNIISDLDRIL

SEQ ID NO: 10436 - protein, 213 aa, Oryza sativa
  unsure (1)..(213): unsure at all Xaa locations
MDHGGGGGGGVWIRAAVAVAAGGAIAARAVRRKSVDSTAVFVGVPAMVAHTVAGYRFAGMLLVFFFTASRMTRVGEKRKRALDPDFKEGGQRNWKQVLSNSGIASVLVVLIALVTGGSDRCLDTRESSLVTALIGGVIGHYACCNGDTWSSELGILSKAEPRIITTFKVVGVDGPTVTRISGRNILDNNGVNVVSVFLTTLITALACVYXSSX

SEQ ID NO: 10437 - protein, 271 aa, Mycoplasma pneumoniae
MDTFTSAVKINWFPGHMKKTHDQLKKLASSLDGVIEVVDARAPTLTQNPEITAYFTNKPKLTLALKADLAQTVANSNILWGTLKQGLQLKRLVIKKLQTLFQAKKNQLKAKGLLVHQFRLAVIGMPNVGKSSLINLLLNKNHLQVANRAGVTKSMSWNQISSEFYLSDTPGVFFKRIDEMAVGYKLVLTNVIKREVVPLEDVGAFAFCYLSKHYPQLLPYEGTDFTEFLHKFAISRKLLQKSNQLNINLACELFVSELINGKYGKLSFELD

SEQ ID NO: 10438 - protein, 245 aa, Mortonia greggii
ALSIAGAVQSQKLAVRAISQLQSLPGGDIKLLCDAVVENVRNLTGYDRVMVYKFHEDEHGEVVAESKRPDLEPYIGLHYPATDIPQASRFLFKQNRMRMIVDCHSTPVSVIQDDGLMQPLCLVGSTLRAPHGCHAQYMANMGSIASLAMAVIINGNDEDGIGGRNTTRLWGLVVCHHTSARCIPFPLRYACEFLMQAFGLQLNMELQLASQLLEKHVLKTQTLLCDMLLRDSPTGIVTQSPSIMD

SEQ ID NO: 10439 - protein, 264 aa, Glycine max
MSNDKDTFNVADLTSALNEDNRADLVNALKSKIQSLAGQHSDILESLSPNVRKRVEVLREIQGQHDELEAKFFEERAALEAKYQKLYQPLYTKRYEIVNGTTEVEEGAVKETAPDNEEDQEKGVPAFWLTAMKNNEVLAEEISERDEGALKYLKDIKWSRIENPKGFKLDFFFDTNPYFTNSVLTKTYHMIDEDEPILEKAIGTEIQWHPGKCLTQKILKKKPKKGSKNAKPITKTENCESFFNFFNPPQVPEDDEDIDEDVAE

SEQ ID NO: 10440 - protein, 364 aa, Oryza sativa (indica cultivar-group)
MAGTVTVPSPSVPSTPLLKDELDIVIPTIRNLDFLEMWRPFFQPYHLIIVQDGDPTKTIRVPEGFDYELYNRNDINRILGPKASCISFKDSACRCFGYMVSKKKYVFTIDDDCFVAKDPSGKDINALEQHIKNLLSPSTPFFFNTLYDPYREGADFVRGYPFSLREGAKTAVSHGLWLNIPDYDAPTQMVKPRERNSRYVDAVMTVPKGTLFPMCGMNLAFDRDLIGPAMYFGLMGDGQPIGRYDDMWAGWCMKVICDHLSLGVKTGLPYIWHSKASNPFVNLKKEYKGIFWQEDIIPFFQNATIPKECDTVQKCYLSLAEQVREKLGKIDPYFVKLADAMVTWIEAWDELNPSTAAVENGKAK

SEQ ID NO: 10441 - protein, 311 aa, Agrobacterium tumefaciens str. C58 (Cereon)
MATRLYEHPIFLEHITPEGHPERPDRLRSLNIALEHPNFERLDRKEAPQANEDAVLLAHPEEHLLAVMRQVPEEDGEINRIESDTYLSPKSLQAALTGIGAAMAAVDDVFSGAADNVFVAARPPGHHAETAKAMGFCLFNNVAIAARHAQKAHGAERIAIIDWDVHHGNGTQDIFWNDISVLFCSTHQMPLYPWSGDKNETGVKNNIVNAPLSPNTGSDHFREAFKSRVLPAIADFSPDLILISAGFDAHHRDPLAQINLVGEDFDWATGRLLEMADKYASNRVVSLLEGGYDLEGLAESAAMHILRMMKG

SEQ ID NO: 10442 - protein, 345 aa, Thermus aquaticus
MKVAVLPGDGIGPEVTEAALKVLRALDEAEGLGLAYEVFPFGGAAIDAFGEPFPEPTRKGVEEAEAVLLGSVGGPKWDGLPRKIRPETGLLSLRKSQDLFANLRPAKVFPGLERLSPLKEEIARGVDVLIVRELTGGIYFGEPRGMSEAEAWNTERYSKPEVERVARVAFEAARKRRKHVVSVDKANVLEVGEFWRKTVEEVGRGYPDVALEHQYVDAMAMHLVRSPARFDVVVTGNIFGDILSDLASVLPGSLGLLPSASLGRGTPVFEPVHGSAPDIAGKGIANPTAAILSAAMMLEHAFGLVELARKVEDAVAKALLETPPPDLGGSAGTEAFTATVLRHLA

SEQ ID NO: 10443 - protein, 472 aa, Glycine max
MARLSSDQVLKDNNAADPTSVTTLHLTHKALSDITCLANFVNLEKLDLKLNNLTSLEGLRSCVNLKWLSVVENKLESLEGIQGLTKLTVLNAGKNKLKSIDQVMSVVSLRALILNENEISSICKLDQLKDLNTLVLSKNPIRKIGEALMKVKSITKLSLSYCELQGIGTSLKSCVELSELRLAHNEIKSLPAELKLNSKLRSLDLGNNVITRWSELKVLELLTNLRNLNLQGNPAATVNKVMRKIKKALSKLQIFNARPVDKDTENKKGSIVDGTRDFSVDQNENDHIEAADDLDSGRKSSKKRKRTVDASKKEDRVVDEENKGHKKDKADRKKESLITNVDPGMENKSTKKKAKKDDKPLDKGFALEENVSKVEKKLKKQHKNDEQSELDVIDDAEASFAELFKINDAENLNLADEMKAQDKVPKDVMKLAGDPVTSFAKHKNAKIQNMESLSAPVAEIGMGGPSTWGDEL

SEQ ID NO: 10444 - protein, 356 aa, Oryza sativa (japonica cultivar-group)
MGVLCFGASNILLCAEDSSSVLGLGGFGGGGGEVAAELGCGGGGGFDFFGFGGGAVFPIDSDEFVALLVEKEMDHQPQRGYLEKLELGGLECSWRKDAIDWICKVHSYYNFGPLSLYLAVNYLDRFLSSFNLPHDESWMQQLLSVSCLSLATKMEETVVPLPMDLQVFDAEYVFEARHIKRMELIVMKTLKWRLQAVTPFSFIGYFLDKFNEGKPPSYTLASWCSDLTVGTLKDSRFLSFRPSEIAAAVVLAVLAENQFLVFNSALGESEIPVNKEMVMRCYELMVEKALVKKIRNSNASSSVPHSPITVLDAACFSFRSDDTTLGSSQSNSNNKDYNSQDSAPASKRRRLNTTPI

SEQ ID NO: 10445 - protein, 237 aa, Triticum aestivum
  unsure (1)..(237): unsure at all Xaa locations
MCSLEATRAELGLAVLYLNKAEARDKICRAIQYGSKFISNGQPGTAQNVDKSTTLARKVFRLLKWVNDLHALISPAPKGTPLTLVLLGKSKNALLSTFLFLDQFVWIGRSGIYQNKERTDRIARISLYCWIASSVCASLVELGELKRLSXAMRKRVEELRGADKXEDEQYRGKMKQSDDRLLALVKAGMDVVVAXGLLQLAPKKVTPRVTGAFGFVTSLISCYQQLPSRAPLAKLKA

SEQ ID NO: 10446 - protein, 247 aa, Xanthomonas campestris pv. campestris str. ATCC 33913
MSKPLQGEIALVTGASRGIGAAIADTLAAQGATVIGTATSASGAAAIGERLAANGGHGRELNVTDAAAVDALIDAIGKEFGAVSILVNNAGITRDNLLMRMKDDDWQAIIDTNLTSVFRTSKAVMRGMMKARKGRIINIASVVGVTGNPGQTNYAAAKAGIIAFSKSLAKEIGSRGITVNVVAPGFIDTDMTKALPEDAKTALLQQIALGHLGQPDDIANAVAFLAGPPARYITGETLHVNGGMYMP

SEQ ID NO: 10447 - protein, 312 aa, Hordeum vulgare subsp. spontaneum
MATAGKVIKCKAAVAWEAGKPLSMEEVEVAPPQAMEVRVKILYTALCHTDVYFWEAKGQTPVFPRILGHEAGGIVESVGEGVTELVPGDHVLPVFTGECKECAHCMSEESNLCDLLRINVDRGVMISDGQPRFTIDGKPIFHFLGTSTFSEYTVIHVGCVAKIDPEAPLDKVCLLSCGISTGLGATLNVAKPKKGMAVAIFGLGAVGLAAMEGARMSGASRIIGVDLNPAKHEQAKKFGCTDFVNPKDHTKPVQEVIVEMTDGGVDRAVECTGNADAMISAFECVHDGWGVAVLVGVAHKEPVFKTHPMNFL

SEQ ID NO: 10448 - protein, 330 aa, Lactococcus lactis
MEVLMTVLVLGGAGYVGSHAVDMLLKRGYDVAVVDNLVTGHRESVPANVRFYEGDVRDHAFLASVFEKENIEGIMHFCAYSLVGESMQKPLMYFNNNVGGAQVILETMEEFGVKHIVFSSTAATFGIPEKSPISEKTPQKPINPYGESKLIMEKMMKWQSQATDMTYVALRYFNVAGAKDDGSIGEAHKNETHLIPIILQTALGQREFITIYGDDYHTPDGTCIRDYIDMEDLIEAHIKALEYLKAGGQSDQFNLGSSKGYSNLEVLETARKVTGKEIPSQMGERRAGDPDELVADSTKAGEILGWKAQNDLEHIITNAWKWHQSHPKGY

SEQ ID NO: 10449 - protein, 179 aa, Candida glabrata
MDKKGKYVVLVSGEGEKFTVEKKIAQRSLLLKNYLNDMHESSLDDEDEEQDEDEDEDDEIVMPVPNVRSSVLQKVIEWAEHHRDSNFPDEDDDDSRKSAPVDAWDREFLKVDQEMLYEIILAANYLNIKPLLDAGCKVVAEMIRGRSPEEIRRTFNIVNDFTPEEEAAIRRENEWAEDR

SEQ ID NO: 10450 - protein, 102 aa, Zea mays
MLNMFVGLCVRTVVQVQHSERGLLVVYGTDGHQLLWKRAMDVPVSHSMPVYGIGENSHTIRAEVCSDFGPDFDPKVFAELCTLASGRVKHLVLSRSSSDGGS

SEQ ID NO: 10451 - protein, 387 aa, Ceriporiopsis subvermispora
MAFTSLLALVALAAITRAAPTTICPDGTRVSNHVCCDFIPLAQALQSTLYMGDCGEDAHETIRLTFHDAIAISQSQGPSAGGGADGSMLIFPTVEPFFHANAGIDDSVNNLIPFLDKFPTITAGDLIQFAGTVALSNCPGAPQLEFLAGRPNATAPAVDGLIPEPQDNVTHILERFADAGGFTPFEVVSLLASHTVARADKVDLTIDAAPFDSTPFTFDTQIFLEVLLKGVGFPGTDNNTGEVESPLPLGNNKQGGNDTGEMRLQSDFALARDDRTACFWQGFVNEQEYMMSSFKAAMSKLAILGHNRNDLIDCSEVVPTPKPPVGKPASFPATTGPQDLQLTCKSERFPSLTIDHGAQETLIPHCSNGGQDCPTVQFTGPAGEDDS

SEQ ID NO: 10452 - protein, 531 aa, Coxiella burnetii RSA 493
MKLKRIFSPLIILLISINGMIGSAWLFGPYFAAKTAGPAALVSWLVGGGLVLIVAFTFAELSTMFPVAGGIARIPQYSHGMATGFMMSWIAWLSCVAMPPIEVLATLQYTSFFFPRLTCLHGNQHVLTHEGLVGAALLMFFLSWLNIASVKHLVRSNVLMTVFKIGIILVIAITLIAVGFHGKNFFAYGGFAPSGWHGIVSAVSMGGIAFAFTGFRHGVELAAETKNPKQAIPLAIIGSIVFCLLLYWLLQLAFIGALHSPSLSKGWAQLAYQGDVGPFSGIAALLGLGWLSWMIYANAVISPLGGALVYVTSTSRIVYGMSKNAYFPAFFMRLNKKAIPVWCIALNGLTGFVLFFVLSGWQSMINFLVSAVVISYGTGPISLITLRYQMPNANRPFKLPQGILLSTLAFYVCNLMVFWCGWESIKKLFAAILIGILFFIVFQKTKQQRLREIHLKYSLWLIIYLGGLTLISYLGSMGGGMGIIPFGWDFIVIALFSLVSLYLAVKSRLPQISAQTHQANTLDSVDSEASA

SEQ ID NO: 10453 - protein, 229 aa, Nicotiana tabacum
MVEISPGFRFYPTEEELISFYLLNKLEGKRPELDRVIPVVTIYNLDPWHLPNLPGELCMGDTEQWFFFVPRQEREARGGRPCRTTTSGYWKATGSPTYVYSSESKVIGVKKSMVFYKGKAPTGRKTKWKMNEYRAIEQETSTSSSFSIPKLRHEMSLCRVYVISGSFRAFDRRPVATVTRDTAAVKIQELAGDRDNISSAISVKNESKSYNIVESDFENLNGWEQINWM

SEQ ID NO: 10454 - protein, 102 aa, Glycine max
MEGDIKLLDGDAPPKKKKSFLVKIKVLFFAKARDFPGLSELPLEVSFGSTTHDCLKKLFVKFPSLEKIKGGMVLALNEEYTTESPLVKNPDELAIIPPKRGG

SEQ ID NO: 10455 - protein, 807 aa, Helicobacter pylori
ALLNQQKVQVALDCLKNAKTDEERKECLKLINDPEIREKFRKELELQKELQEYKDCIKNAKTEAEKNECLKGLSKEAIERLKQQALDCLKNAKTDEERNECLKNIPQDLQKELLADMSVKAYKDCVSKARNEKEKQECEKLLTPEARKKLEQQVLDCLKNAKTDEERKKCLKDLPKDLQSDILAKESVKAYKDCVSQAKNEAEKKECEKLLTPEAKKLLEEEAKESVKAYLDCVSQAKTEAEKKECEKLLTPEAKKLLEEEAKESVKAYLDCVSQAKTEAEKKECEKLLTPEARKKLEEAKKSVKAYLDCVSQAKTEDEKKECEKLLTPEARKLLEQQALDCLKNAKTDEERKKCLKDLPKDLQKKVLAKESVKAYLDCVSQAKNEAEKKECEKLLTPEARKLLEEAKESIKAYKDCVSKARNEKEKKECEKLLTPEAKKLLEEEAKESVKAYLDCVSQAKTEAEKKECEKLLTPEAKKLLEEAKESLKAYKDCVSRARNEKEKKECEKLLTPEAKKLLEQQALDCLKNAKTEADKKRCVKDLPKDLQKKVLAKESVKAYKDCVSRARNEKEKKECEKLLTPEAKKLLEEAKESLKAYKDCLSQARNEEERRACEKLLTPEARKLLEQEVKKSVKAYLDCVSQAKTEAEKKECEKLLTPEARKFLAKQVLNCLEKAGNEEERKACLKNLPKDLQENVLAKESLKAYKDCLSQARNEEERRACEKLLTPEARKLLEQEVKKSVKAYLDCVSRARNEKEKKECEKLLTPEARKFLAKELQQKDKAIKDCLKNADPNDRAAIMKCLDGLS

SEQ ID NO: 10456 - protein, 76 aa, Triticum aestivum
  unsure (1)..(76): unsure at all Xaa locations
DGKVNKLIGLIVKWLKPGGHIFTRESCFHHSGDSKRNVNPTHYXEPRFYNNVSMECHSYERDGTSFEPYPVLSMCI

SEQ ID NO: 10457 - protein, 211 aa, Zea mays
GSPGFGFVGERIEMAASDVEYRCFVGGLAWATDDHSLHNAFSTYGEVLESKIILDRETQRSRGFGFVTFSTEEAMRNAIEGMNGKELDGRNITVNEAQSRGGRGGGGGGGYGGGRGGGSSGGGGGSGGGGSGGGGGSGGGGGGGGGTSGRCPVDALKLGVCANLLNGLINATLGTPPRTPCCTLIQGLADLEAAVCLCTVLKSTSWASTST

SEQ ID NO: 10458 - protein, 258 aa, Archaeoglobus fulgidus
LRYNLWFGVYDGKEIKLSENFEESFLKAENPSPLPFNVSEVGAKALGKDYYRILRKTALAVSEKMVEKELRREDRYVVALVKALEEIDESINMLNEKLEDIRAVKESEITEKFEKKIRELRELRRDVEREIEEVMEKIAPNMTELVGAKVAAKLLERAGSMERLVRLPASKIQVIGAEKSLYKAFARMKKGKKAKIPKHGIIFLHPFIRTLPKAKRGKMARFLAAKLAIAAKIDYFRGEIDESLYESIRRRYEELRRK

SEQ ID NO: 10459 - protein, 394 aa, Zea mays subsp. mays
  unsure (1)..(394): unsure at all Xaa locations
XGAXRRARLPPGEMGWPLVGGMWDFLRAXKSGXPDXFIASFVRRFGRTGVYRSFMFSSPTVLVTTAEGCKQVLMDDDAFVTGWPKATVALVGPRSFVAMPYDEHRRIRKLTAAPINGFDALTGYLPFIDRTVTSSLRAWADHGGSVEFLTELRRMTFKIIVQIFLGGADQATTRALERSYTELNYGMRAMAINLPGFAYRGALRARRRLVAVLQGVLDERRAARAKGVSGGGVDMMDRLIEAQDERGRRLDDDEIIDVLVMYLNAGHESSGHITMWATVFLQENPDMFARAKAEQEAIMRSIPSSQRGLTLRDFRKMEYLSQVIDETLRLVNISFVSFRQATRDVFVNGYLIPKGWKVQLWYRSVHMDPQVYPDPTKFDPSRWEGHSPRAGTFL

SEQ ID NO: 10460 - protein, 344 aa, Thermus thermophilus
MKVAVLPGDGIGPEVTEAALKVLRALDEAEGLGLAYEVFPFGGAAIDAFGEPFPEPTRKGVEEAEAVLLGSVGGPKWDGLPRKIRPETGLLSLRKSQDLFANLRPAKVFPGLERLSPLKEEIARGVDVLIVRELTGGIYFGEPRGMSEAEAWNTERYSKPEVERVARVAFELARKRRKHVVSVDKANVLEVGEFWRKTVEEVGRGYPDVALEHQYVDAMAMHLVRSPARFDVVVTGNIFGDILSDLASVLPGSLGLLPSASLGRGTPVFEPVHGSAPDIAGKGIANPTAAILSAAMMLEHAFGLVELARKVEDAVAKALLETPPPDLGGSAGTEAFTATVGMGI

SEQ ID NO: 10461 - protein, 297 aa, Rhizobium sp. USDA 1970
RGKTQIKEFDAFPTLEQLPLWGFDGSSTQQAEGRSSDCVLKPVAVYPDPVRTNGALVMCEVMMPDGKTPHPSNTRATVLDDESAWFGFEQEYFFYKNGRPLGFPEQGYPAPQGPYYTGVGYKNVGDIARQIVEEHLDICLAAGINHEGINAEVAKGQWEFQVFGKGSKNAADEVWLARYLLLRLTEKYGIDVEFHCKPLGDTDWNGSGMHANFSTAYLREVGGKDYFEALMAAFEKNLHDHINVYGPDNHLRLTGKHETAPWDKFSYGVADRGASIRVPHSFVNNGYRGYLEDRRPN

SEQ ID NO: 10462 - protein, 298 aa, Zea mays
MRPMASNGMASAPSPFFPPNFLLQMQQTPSDHEHQEQHHHHHHHKHHLAAPPLHPHHNPFLPSSQCPSLQDFRGMAPIMLGKRPMYGADVQVVGGEEVNGCGGVNEDELSDDGSQAGGEKKRRLNVEQVRTLEKNFELGNKLEPERKLQLARALGLQPRQVAIWFQNRRARWKTKQLEKDYDALRRQLDAARAENDALLSHNKKLQTEIMALKGGGGGRQEAASELINLNVKETEASCSNRSSDENSSEINLDISRPPRAADESPAAMDSYRGIPFYACARADDVDQLSCTRDHHHFL

SEQ ID NO: 10463 - protein, 376 aa, Zea mays
ASLSSPFPPLSLSAPAGPHTQSPSLSHTQSHTHRPPSLVLGSPCYLAFTDLPLPNRTVTSRRPGAVVLRLIAARRWWRAADRIEQRMDGGGGLGGLRWTAEEASTIGGIATVSLLHSFIPTHWLPFSIVARAQRWPLSRTLLVTAFGGVLHVVSTALLGITAVTMANTIAGEETVHKLASLLLIFLGASYILLFALGKGGHSHAHNHPMEKMAVAGLVLVPALSPCATTLPVFLAVGNSSSMMILAIIVLLFSTITVMTSLVALSFYGASQIKFHWVERYDKILVGTVLCLVGVLTYVLHHHDGMSMCTRYSISLVASLLLSLFYCFLFSNNSASVPTSLPRASFPPFAAVAARYCSPPRRLQIWLSPNSKRLGEG

SEQ ID NO: 10464 - protein, 186 aa, Agrobacterium tumefaciens str. C58 (Cereon)
MTAINAAKILILATDGYERSELRVPYEQLKARGADVKIASIKEGEIKSWDEKNWGDSIAVDLSAKTVKVNDFDALVLPGGQINPDILRHDEDAMRVVRDFVKSGKVVAAICHAPWLLIEADALRGRDATSYWSIKTDLKNAGANWKDEKVVTDKGIITSRSPDDLDAFVAKIVEEVEEGRHERRAA

SEQ ID NO: 10465 - protein, 420 aa, Diplotaxis erucoides
YHHHSYTFFFVILVLFPHAFSTNTLSSNEALTISSNRTLVSPGDVFELGFFKTTTRNSRDGTDRWYLGIWYKTTSDQRTYVWIANRDNPLHSSMGTLKISQENLVLFDQSATPVWSTNLTGVAHLPVTAELLANGNFVLRDSKTKDLDRFMWQSFDFPVDTLLPEMKLGRKRNSSEKEKILTSWKSPTDPSSGDFSLILETEGFLHEFYLFNNEFKVYRTGPWNGVRFNGIPKIQNWSYIDNSFIDNHEGLAYSFQVNNNHNIHSRFRMSSTGYLEVITWTKTVPQRNMFWSFPEDSCDLYKVCGPYAYCDMHTTPRCNCIQGFVPKNAAQWELRDMSSGCVRSSKLSCGEGDVFLRLGQMKLPETPEAVVEERIGLKECKEKCLRDCQCSGFANIDNMKGGSGCVTWTGELDDMRKYDA

SEQ ID NO: 10466 - protein, 209 aa, Glycine max
  unsure (1)..(209): unsure at all Xaa locations
PPPDLSLSQLFFIFSLPLTESRTRLDSYGLRSPPSHTQPAPPPDPTMSRASSAASGEIMLFGVRVVVDSMRKSVSMNNLSQYEHPLDATTTNNNKDAVAAGYASADDAAPQNSGRHRERERKXRGVPWTEEEHKLFXLVGLQKVGKGDWRGISKNYVKTRTPTQVASHAQKYFLRRSNLNRRRRRSSLFDITTDTVIIYSSHAPPLLLF

SEQ ID NO: 10467 - protein, 139 aa, Nostoc sp. PCC 8009
VYRFDENWNGIVIAEEKLEHLTAYLGLHYPASDIPQQARKLYSQNWLRIIPDATYQPVAIVPTNNPLTEQPLDLSNSVLRSVSPLHVEYMHNMGVAASMSISLKKNQKLWGLIACHHQTPKYIPYELRNTCEFLAQITS

SEQ ID NO: 10468 - protein, 457 aa, Shigella flexneri 2a str. 301
MMEGQQHGEQLKRGLKNRHIQLIALGGAIGTGLFLGSASVIQSAGPGIILGYAIAGFIAFLIMRQLGEMVVEEPVAGSFSHFAYKYWGSFAGFASGWNYWVLYVLVAMAELTAVGKYIQFWYPEIPTWVSAAVFFVVINAINLTNVKVFGEMEFWFAIIKVIAVVAMIIFGGWLLFSGNGGPQASVSNLWDQGGFLPHGFTGLVMMMAIIMFSFGGLELVGITAAEADNPEQSIPKATNQVIYRILIFYIGSLAVLLSLMPWTRVTADTSPFVLIFHELGDTFVANALNIVVLTAALSVYNSCVYCNSRMLFGLAQQGNAPKALASVDKRGVPVNTILVSALVTALCVLINYLAPESAFGLLMALVVSALVINWAMISLAHMKFRRAKQEQGVVTRFPALLYPLGNWICLLFMAAVLVIMLMTPGMAISVYLIPVWLIVLGIGYLFKEKTAKAVKAH

SEQ ID NO: 10469 - protein, 127 aa, Triticum aestivum
  unsure (1)..(127): unsure at all Xaa locations
MAGMADMPMRPARPGPPMQHRGPPPMARLRPEPIDREKTCPLLLRVFTRVAGHHQNEEFAXXEGKEPKDEVQIYTWKDATLRELTDLVKELLFQQGKGTEASFNCIPDKNGLLFQTGFTSLWHGKVY

SEQ ID NO: 10470 - protein, 470 aa, Zea mays
PPPPFFPLPPRLHPFPSISSHLATPLPLSRADRLAHPSIEHGKKIPVRRGLNSIGLVLVWVGTMAATEASADKNAVFRKLRTKSDNKMCFDCNAKNPTWASVTYGVFLCIDCSAVHRSLGVHVSFVRSTNLDSWTPEQLKMMVYGGNNRAQAFFKQHGWTDGGKIEAKYTSRAADLYRQLLAKEVAKSATEDGNNSWPSSPVAASQASDQTAAFPDLKLTEVSKENVSEKEDSEIVRSPRVPTRSIKKPIGAKKPGNKTGGLGARKLTSKPNESLYEQKPEETAPVLPSSVIASTTARSKPHTSRFEYVENAPAPKTGSSSEGNLMSGHVAPPKSSNFFVEFGMDSGYHKKSTSSSSKVQIEESSEARQKFSNAKSISSSQFFGDQASFEKDTQVSLQKFSGSSAISSADLFGHPANNSSVDLSASDLINRISFQATQDLSSLKNMAGETGKRLTSMASNIITDLQDRIL

SEQ ID NO: 10471 - protein, 359 aa, Synechocystis sp. PCC 6803
MRLEISSPQTKLPYPKTEELPFTLQELRNAIPADCFEPSVVRSLGYFFLDVGLIAGFYALAAYLDSWFFYPIFWLIQGTLFWSLFVVGHDCGHGSFSKSKTLNNWIGHLSHTPILVPYHGWRISHRTHHANTGNIDTDESWYPVSEQKYNQMAWYEKLLRFYLPLIAYPIYLFRRSPNRQGSHFMPGSPLFRPGEKAAVLTSTFALAAFVGFLGFLTWQFGWLFLLKFYVAPYLVFVVWLDLVTFLHHTEDNIPWYRGDDWYFLKGALSTIDRDYGFINPIHHDIGTHVAHHIFSNMPHYKLRRATEAIKPILGEYYRYSDEPIWQAFFKSYWACHFVPNQGSGVYYQSPSNGGYQKKP

SEQ ID NO: 10472 - protein, 364 aa, Zea mays
MAGTVTVPGSSTPSTPLLKDELDIVIPTIRNLDFLEMWRPFFQPYHLIIVQDGDPTKTIKVPEGFDYELYNRNDINRILGPKASCISFKDSACRCFGYMVSKKKYIYTIDDDCFVAKDPSGKDINALEQHIKNLLSPSTPFFFNTLYDPYREGADFVRGYPFSLREGAHTAVSHGLWLNIPDYDAPTQLVKPKERNERYVDAVMTIPKGTLFPMCGMNLAFDRDLIGPAMYFGLMGDGQPIGRYDDMWAGWCVKVICDHLSLGVKTGLPYIWHSKASNPFVNLKKEYKGIFWQEDIIPFFQNVTIPKDCDTVQKCYIYLSGQVKEKLGTIDPYFVKLGDAMVTWIEAWDELNPSTPAAANGKAK

SEQ ID NO: 10473 - protein, 493 aa, Xanthomonas campestris pv. campestris str. ATCC 33913
MYRMLKSLLRVKPIEPAGRVDAGEPVEGSLQGEATLQRTLTAKHLIMLGIGAVIGAGIFVMTGQAAANHAGPAVMLSFVFAGIACTFAGLCYAEFAAMMPVSGSAYSYSYATLGEGIAWFIGWCLVLEYLFAGSSVAVAWSAYLISFITGTLGLPFPTELTNAPLAWINGEFVASGNILNLPAVLIVAAVSGLCYVGITQSAFINAIVVAIKIAVICLFVGFGAAYIDPANWHPFIPENTAPGVFGWSGVFRAASIVFFAYIGFDAVSTSAGETKDPQRNMPIGILGSLAVCTIIYIIVCAVLTGLMPYTQLGTAKPVATALEAHPQLTWLKTAVEIGAIAGLSSVVLVMLMAQPRIFYTMAKDGLMPKLFGKVHPKFHTPYVGTVIVGVVAASLAGLIPLSVLGELVSMGTLLAFATVCAGVMVLRFTKPELERPFRVPLAMIVCPLGTLACLALFFQAFQEHWKVFVGWTVIGLVIYFGYGIHHSRLARKA

SEQ ID NO: 10474 - protein, 510 aa, Thermoplasma volcanium
MLKRELGIIDLTMSSVTGMIGSGWLFSALYASSIAGPYSIISWIVGSLIVAVLALIYADLSGRMPTAGAAAAYPFLTNGDAAGSINAWSLFLGYASTPPLEVIASITYMNFVMPGLINSSGMLTLRGMLIAISLLFVFFIINAMGIRHTSKVNNYISYLKIGIPIITSFFFISTMFSISNFSYVSSVHPEGIFTAIPDAGIAFSFLGFRQAVELSGEAKNPQRTVPIAIMLSVAIASGIYLLVQVAFIGSLKWFSLTPGDWSGLYNSAYSSGPMLVLASALGLGALASVLLFDGVVSPLGTSNVYQTSTSRVVYRISRMGFLTKKIGTLNSNSVPFYALLLDFFVMSLFILPFPSWYDLVSVNSDLTIIAYMTGPISLVIMNQLGIAPKGFKLPLAKILAPLGFVFSILIIYWSGYPTTLYMSIIALAGLVLFIFARRSPLKSLVGASYMIFILIFVPVASFLGSYGIGLFPFPYDIAIVAVASLGAFAIGTRLYVPSADMSDRIKETVN

SEQ ID NO: 10475 - protein, 639 aa, Oryza sativa (japonica cultivar-group)
MALDGGGEVGRRRRRRGWGGGFPSLMRRKQVDSDRVRAAEGEGQPQLAKELNIPALVAIGVGSTIGAGVYVLVGTVAREHAGPALTISFLIAGIASALSAFCYAELASRCPSAGSAYHYSYICVGEGVAWLIGWALVLEYTIGGSAVARGISPNLALFFGGPDSLPWILSRHQLPWFDVIVDPCAAALVFVVTVLLCVGIKESSAVQELITVLNACVMIFVIVAGSYIGFQIGWVGYKVTDGYFPHGINGMLAGSATVFFAYIGFDTVASTAEEVKNPQRDLPLGIGAALSICCCLYMMVSVVIVGLVPYFAMDPDTPISSVFAKHGMQWAMYIVTSGAVLALCSTLLGSLLPQPRILMAMARDGLLPSFFADVNKRTQVPVKSTVVTGLCAAALAFFMDVSQLAGMVSVGTLLAFTIVAVSILILRYIPPDEVPLPSSLQETFCLSQEYDEERVSGILGDERCKTSETKDVILAESMEDPLIEKKITRKMDEMKRRKVAAFSIGSVCVGVMVLTSAASATWLPFLPMCIGCIVGALLLVAGLGLLCWIDQDDGRHSFGQSGGFTCPFVPLLPVLSILVNTYLLINLGGEAWMRVGIWLLIGVLVYILYGRTNSSLKDVIYVPVAQADEIYKSSSGYVS

SEQ ID NO: 10476 - protein, 340 aa, Mycoplasma genitalium
MIGAKTRVAIVGGIGYIGSCFASFIKEQNDKLIVTVIDNNKNNHVIKLLKKIGIEFYFADLLDRHKLTEVIAAIQPDVVFHFAAKTSVSESVHNPLKYFDCNVIGTLNLISAISNLQKPIKLFFASSAAVYGQTTNSYISEEIVITETQATNPYGLSKFLDELILNAVAKNSQLQVVCLRFFNVAGAILPFGNFNGNTTLLIPNLVKAFLKQTPFFLYGNDYATKDGSCIRDYIHVYDICNAHFLLWKWLNDHRQIKFETFNLGSGIGTSNLEVIDIAKKVFYPSRLNLEIRPKRSWDPAILVANVAKAKQTFQFKITRNLKDMISDERNFYENFYNDAY

SEQ ID NO: 10477 - protein, 344 aa, Listeria monocytogenes
  unsure (1)..(344): unsure at all Xaa locations
LDXVTTLQADRLGIKSIDGLEYLNNLTQINFSNNQLTDITPLKDLTKLVDILMNNNQIADITPLANLTNLTGLTLFNNQITDIDPLKNLTNLNRLELSSNTISDISALSGLTNLQQLSLGNQVTDLKPLANLTTLERLDISSNKVSDISVLAKLTNLESLIATNNQISDITPLGILTNWDELSLNGNQLKDIGTLASLTNLTDLDLANNQISNLAPLRGLTKLTELKLGANQISNISPLAGLTALTNLELNENQLEDISPISNLKNLTYLTLYFNNISDISPVSSLTKLQRLFFYNNKVSDVSSLANLTNINWLSAGHNQISDLTPLANLTRITQLGLNDQEWT

SEQ ID NO: 10478 - protein, 336 aa, Oenococcus oeni MCW
MATMDALVLTAVKDMKIEQVDKPQVKANEVLIETKYAGICGTDHALYNGLPGSAAAVPPIVLGHENSGVVSEVGEKVTSVKVGDRVTVDPNIYCGHCFYCRTGRPELCDNLSAVGVTRNGGLEQYFTAPSTQVYKVPDNVSLKAAATTEPISCAVHGVKLLKLTPYQKALVIGDGFMGQLFVQLLRAYGVHQVDFAGIIDEKLALNKEKFGVTNTYNTTRDKIPADYDVVIEAVGLPETQEQAVNATVKGAQVLMFGVGKPNQEFKMNTYEVYQKQLTIQGSFINPNAFEDSLALLSSGKLDVLSLISNEPSLDKVSDYLDGSVKNVSKAVVKVGA

SEQ ID NO: 10479 - protein, 181 aa, Gossypioides kirkii
NKGAWTAEEDRKLAEVIAVHGAKRWKTIPTIAGLNRCGKSCRLRWMNYLRPNIKRGNISDQEEDLILRLHKLLGNRWSLIAGRLPGRTDNEIKNYWNSHLSKKVNQKEKHSGASAGQVCKFAQKRLVENAKEQVREENTSTGVEESNISFDVNDFFDFSNVDTRNFEWVNRFLEVDEGFKF

SEQ ID NO: 10480 - protein, 406 aa, Brassica napus
MAAALQTNIRPVKFPATLRALTKQSSPAPFRVRCAAASPGKKRYNITLLPGDGIGPEVISIAKNVLQQAGSLEGLEFSFQEMPVGGAALDLVGVPLPEETVSAAKESDAVLLGAIGGYKWDKNEKHLKPETGLLQLRAGLKVFANLRPATVLPQLVDASTLKREVAEGVDLMVVRELTGGIYFGVPRGIKTNENGEEVGYNTEVYAAHEIDRIARVAFETARKRRGKLCSVDKANVLDASILWRRRVTALAAEYPDVELSHMYVDNAAMQLVRDPKQFDTIVTNNIFGDILSDEASMITGSIGMLPSASLSDSGPGLFEPIHGSAPDIAGQDKANPLATILSAAMLLKYGLGEEKAAKRIEDAVLGALNKGFRTGDIYSAGTKLVGCKEMGEEVLKSVDSHVQASV

SEQ ID NO: 10481 - protein, 345 aa, Thermus thermophilus
MKVAVLPGDGIGPEVTEAALKVLRALDEAEGLGLAYEVFPFGGAAIDAFGEPFPEPTRKGVEEAEAVLLGSVGGPKWDGLPRKISPETGLLSLRKSQDLFANLRPAKVFPGLERLSPLKEEIARGVDVLIVRELTGGIYFGEPRGMSEAEAWNTERYSKPEVERVARVAFEAARKRRKHVVSVDKANVLEVGEFWRKTVEEVGRGYPDVALEHQYVDAAAMHLVRSPARFDVVVTGNIFGDILSDLASVLPGSLGLLPSASLGRGTPVFEPVHGSAPDIAGKGIANPTAAILSAAMMLEHAFGLVELARKVEDAVAKALLETPPPDLGGSAGTEAFTATVLRHLA

SEQ ID NO: 10482 - protein, 1121 aa, Lycopersicon esculentum
MASGSGSRGKHDRNHQPKNQSQFSGTSNTNALSKAVAQYTTDARLHAAFEQSGESGKNFDYSQSVRNSTESVTEHQITAYLNKMQRGGHIQPFGCTIAVEEASFCVIAYSENACEMLDIMPQSVPSLEKNEILKIGTDVRTLFSSSSSGLLEGAFGAREITLLNPIWVHSKNSGKPFYAILHRIDVGIVIDLEPARTEDPALSIAGAVQSQKLAVRAISLLQSLPGGDIDLLCDTVVKSVRELTGYDRVMVYKFHDDEHGEVVAESRRSDLEPYIGLHYPATDIPQASRFLFKQNRVRMIVDCTAIPVRVIQDESLMQPLCLVGSTLRAPHGCHPQYMVNMGNVASLTLAVVINGNDDEVVGGRNAMRLWGLVVGHHSSARFIPFPLRYACEFLMQAFGLQLNMELQLASQLAEKRVLRTQTVLCDMLLRDSPTGIVTQNPSIVDLVKCDGAALYYQGRYYPLGITPTAAQIKGIVEWLLTCHVDSTGLSTDSLADAGYPEAASLGAAVCGMAVAYVTSKYFLFWFRSHTASEIKWGGAKHHPEDKDDWQKMHPRSSFKAFLEVVKNRSLPWENAEMDAIHSLQLILRDSFKDASNSKSIVRVQLREEGLQGMDELRSVAREMVRLVETATAPIFAVDVEGRINAWNAKVAELTELSVEEAIGKSLVHDLVHEESQTTAQNLLRKALRGEEDKNIEIKLRTFGAEQLKKTVFVEVNACSNKDYTNNIVGVSFIGQDITAQKVVLDKFVRIQGDYKAIMHSPNPLIPPIFVSDENTCCFEWNTAMEKLSGWNKEEIIGKMLVGEIFGTFCRLKGPDDMTNFMIMLHKAIGGQEIDKFPFSFSDRNGKFVQALLTANKRVNVDGQIIGAFCFLQIASPELQKTLMQRQQEKTSNIHMKELAYICRELKNPLNGIRFTNSLLEATELTENQKQFLETSAACERQMSKIIRDIDLDNIEDGSLELEKGEFFLASVIDAVVSQVMLLLRERGVQLIRDIPDEIKTLRVYGDQVRIQQVFADFLQIMASYAPPREGWVEVHLRPSIKQISDGVTIVHIEFRIVCPGEGLPPELIQDMFHNSLWVTQQGLGLSMCRRILQLMNGQVQYIRESERCFFLIILQLPMLIQ

SEQ ID NO: 10483 - protein, 161 aa, Triticum aestivum
  unsure (1)..(161): unsure at all Xaa locations
MLLLLLLLLFSSLQLPTTAIDTLALGQALPWNETLVSKGGEFELGLFSPGNSGKHYVGIWYKKISKQTVVWVANREHPIVKPSTSRFMLSIHGELLLLTMPSDTLLWSSNASSRSPPSTTVATLQDDGNLVVRRSNATSSSXYVVWQSFDHPTDTWLPGAR

SEQ ID NO: 10484 - protein, 285 aa, Shigella flexneri 2a str. 301
MFILYFQREWSVTLCINKESIKMGKLTGKTALITGALQGIGEGIARTFARHGANLILLDISPEIEKLADELCGRGHRCTAVVADVRDPASVAAAIKRAKEKEGRIDILVNNAGVCRLGSFLDMSDEDRDFHIDINIKGVWNVTKAVLPEMIARKDGRIVMMSSVTGDMVADPGETAYALTKAAIVGLTKSLAVEYAQSGIRVNAICPGYVRTPMAESIARQSNPEDPESVLTEMAKAIPLCRLADPLEVGELAAFLASDESSYLTGTQNVIDGGSTLPETVSVGI

SEQ ID NO: 10485 - protein, 863 aa, Ajellomyces capsulatus
MRGGVLDLLPIAFASLAVATEHLTQSPPYYPSPWASGQGGWEDAVERARDFVSQLTLVEKVNLTTGVGWMQENCVGQVGSIPRMGLHSLCMQDGPLGFDLPDYVSAFPAGVNVGATFSKELAYLRGKAMGEEHRDKGVDVVLGPVVGPLGRSPDGGRNWEGFSPDPVNSGLLVAETIKGIQSAGVIACVKHFIGNEQERFRQGPEAQGYGFDISESSSSNIDDVTMHELYLWPFADAVRAGVGSVMCSYNQINNSYGCGNSYTQNKLLKAELGFQGFIMSDWQAHHSGVGSALAGLDMSMPGDTVFGTGRSYWGPNLTIAVANGTIPEWRVDDMAVRIMAAYFKVGREAAKVPVNFNSWTRDEYGYTHALVKEGYGKVNEKINVRAKHASIIRQVGAASVVLLKHTGSLPLTGLEKNVAVIGEDAGPNLWGPNGCPDRRCDNGTLAMGWGSGTADFPYLVTPAEAIQNEILFKGEGSVFPIFDNWASDQIKSAASQATVSLVFVNADSGEGFISVDGNEGDRKNLTLWKGGDELIQTVASHCNNTVVVIHSTGPVLVGEWNEHPNITAILWAGLPGQESGNSIADVLYGKVNPGGRTPFTWGRTAEDYGASILKEPNEGNGAPQVDFTEGIFTDYRAFDKADVKPIYEFGFGLSYTSFSYSDLNVEVVSSEPYMPTRGKTEPAPILGESDRNLSSYLFPEGTDRVTYYIYPWLNVTDPAKASMDSHYGLQKEDYIPPGATDGSPQELLPASGGPGGNPGLYEVLYRVTATITNTGSISGDEVPQLYVSLGGPNDAKVVLRNFDRFTLAAGEAKIWTSILSRRDLSNWDPVTQNWVISDYPKTVYVGSSSRKLLLSAPLVSNNY

SEQ ID NO: 10486 - protein, 218 aa, Triticum aestivum
  unsure (1)..(218): unsure at all Xaa locations
RYQLCYHRRWVTETLGLDVAGKELEYTRRVVQLDGKHYHGWSHRQXTLQALXGWENDLKXCRELLESDVCNNCAWNQRYYVIHRSHSLGGLEGMREFEVSYTVKVILANTENESSRRYLKALYKDDTESRISDSSVSSFCXKVFSHSDCXMDSLLSNLIDIICDGLRATIDHGDSVKDLANEDPESNXSNVVCTILCREDRIRANYRARRKIKITAPI

SEQ ID NO: 10487 - protein, 264 aa, Nicotiana tabacum
MLELRLVQGSLLKKVLESIKDLVNDANFDCSATGFSLQAMDSSHVALVALLLRSEGFEHYRCDRNISMGMNLGNMAKMLKCAGNDDIITLKADDGSDTVTFMFESPTQDKIADFEMKLMDIDSEHLGIPEAEYHAIVRMPSAEFARICKDLSSIGDQVVISVTKEGVKFSTRGDIGTANVVCRQNTTVDKPEEATVIEMNEPVSLTFALRYLNSFTKATPLSNTVTISLSSELPVVVEYKIAEMGYIRFYLAPKIEEDEEETKP

SEQ ID NO: 10488 - protein, 331 aa, Zea mays; identical to SEQ ID NO: 9032

SEQ ID NO: 10489 - protein, 146 aa, Escherichia coli
MRVLVTGGSGYIGSHTCVQLLQNGHDVIILDNLCNSKRSVLPVIERLGGKHPTFVEGDIRNEALMTEILHDHAIDTVIHFAGLKAVGESVQKPLEYYDNNVNGTLRLISAMRAANVKNFIFSSSATVYGDQPKIPYVESLLPIPGQ

SEQ ID NO: 10490 - protein, 343 aa, Pseudomonas putida
MHYRSLGKSGLLVSELCFGTMSFGQQGYWEKIGGLDQSAAQRLVDIALDAGINFFDSADVYSYGQSEEILGKTLKGKRDKVVLATKVRGRMSQEINDVGLSRRHIIQSCENSLRRLGTDYLDLYIVHSFDFMTPLEETLSTLNDLVHSGKVRYLGCSNYFAWQLMKALSISERHHWEKFISLQAYYSLLSRDVEIELAPLCRDQGLGITPWSPLGAGFLTGKYPRGGKGPRGARRSKEEHNFIQIEEEKAYAILDEVQRIAKLRGVSSAQVSLNYLLRKSPVSSVIIGATKPEQLQDNLKTVDWQLSAEEVAALDEISTPPRLYPHWMLEFTRLDRDNPAMIM

SEQ ID NO: 10491 - protein, 519 aa, Yarrowia lipolytica
MLTNLTIVLITLLVTYTVLTRTALRIQRARKAKQMGATLPPRVNNGILGWYGLWLVIQNARSMKLPHTLGKRFANGPTWLTPVAGNEPINTIDPENVKAILATQFKDFCLGIRHRALSPSIGDGIFTLDGEGWTHSRALLRPQFSRQQISRVHSLERLMQILFKLIRKENGEYFDLQNLFFMFTLDSATEFLYGASVDTLADLLGEPVEGDHGGVGEEVRKAYQQSINNAQDISAIRTRLQGLYWIAGNIYQRNLYQKSNKGVKDFSQFFVDKALNTSKEKLKEMEDSDNYVFLYELVKSTRNPVVIRDQLINILVAGRDTTASLLSFTFYTLGRRPDVLKKLRAAILEDFGTSPDEITFESLKRCDYLRYVLNEVLRLYPSVPINARSATRDTTLPRGGGPDGKQPVFVYKGQMVAYCVYWMHRDKKYWGEDALEFNPDRWDPKVQPQNKGWEYLPFNGGPRICLGQQFALTEAGYVVTRMLQEFDTVHCKNQKEEEHPPYALDLTMRHGEGVWVSMK

SEQ ID NO: 10492 - protein, 479 aa, Leuconostoc mesenteroides subsp. mesenteroides ATCC 8293
MSEHKGHIQRNLKTRHVSMIALGGSIGTGLFVASGATVAQAGPLGAIVAYLAIGVMVYFLMTSLGEMATYSPTSGSFSDYAGKYVDPALGFAMGWNYWFNWAITLAVDIVAVGLVAEFWFPNTPGWIFSAIALLLIFLINIFSVGTFGEAEFWLSMIKVVTIIAFLIVGLATIFGVIHSDINVMKNLSVGNHGFVGGPQAILSVFVVAGFSFQGTELIGITAGEAEDPDKSVPKAINQVFWRILLFYILAIFVISALVYYKDPRLLSSSTQNIAVSPFTIVFKNAGIAFAASLMNAVILTSIVSSANSGSYASTRMLYAMARKGDAPKIFAKLSTRGVPVAALVLTTAIGLLAFIANTKGGSVAYTWLVNASGLTGFIAWVGIAISHYRFRRAYVAQGKSLSDLKYKAKWFPFGPLFALVISIGVIIGQDPDSFAHLNWEKIFVTYLSVPLFVILYFWYKVSHKTKLIALKDVDLKQYK

SEQ ID NO: 10493 - protein, 256 aa, Glycine max; identical to SEQ ID NO: 3617

SEQ ID NO: 10494 - protein, 276 aa, Zea mays
  unsure (1)..(276): unsure at all Xaa locations
LQGEAAAAVAPQPALRPALAFHTTTTSXAPPRKPGPLAVGAQILRSEGAAGLFSGVSATMLRQTLYSTTRMGLYDILKTRWARENGGVLPLHRKILAGLVAGGVGAAVGNPADVAMVRMQADGRLPLAERRNYRGVGDAIGRMARDEGVRSLWRGSSLTVNRAMIVTASQLATYDQAKEAILARRGPGADGLATHVAASFTAGIVAAAASNPVDVVKTRMMNMKVAPGAPPPYAGAVDCALKTVRSEGPMALYKGFIPTVMRQGPFTVVLFVTLEQ

SEQ ID NO: 10495 - protein, 612 aa, Oryza sativa
MSSAAGGGGYGGGQGGGAEHHHHHHGHAGHLLLHHHPQHVAGAAVAAAAAAAGGQMYHVPQHSRREKLRFPADAGDSPPPHGHGHGHAPQQQQQHGSWPPPPAFYSYASSSSSYSPHSPTLAQAQLVAHGLAPPLPQIPTQNFSLSLSSASSNPPPPQAQPRRQLGGLAQATGPFGPFTGYAAVLGRSRFLGPAEKLFEEICDVGGAASHVDRTISDEGLLDADPMDGVDHDVVDHDLGGADRAAADAGPISGAEQQWKKTKLISMMEEVCKRYRQYYQQVQAVMASFETVAGFSNAAPFAALALRAMAKHFKCLKSMILNQLRNTSNKVAVKDGLNKEIAVFGLAGGSSGGAGLQRANSASAFGQPHNIWRPQRGLPERAVSVLRAWLFEHFLHPYPTDGDKQMLAKQTGLTRNQVSNWFINARVRLWKPMVEEIHNLEMRQMHKHSVVDKGQHSVHHQAQHSSQCSGNPSVPSDSHPGQSSSITRNHNTAASQGFPDELSQMSQSIQGQVSFAYNGLTSQHNIASPHHQHQQVGGVGIGGGNGGVSLTLGLHQNNRVCIAEPLPAALPANLAHRFGLEEVSDAYVMSSFGGQDRHFGKEIGGHLLHDFVG

SEQ ID NO: 10496 - protein, 489 aa, Escherichia coli
MVSETKTTEAPGLRRELKARHLTMIAIGGSIGTGLFVASGATISQAGPGGALLSYMLIGLMVYFLMTSLGELAAYMPVSGSFATYGQNYVEEGFGFALGWNYWYNWAVTIAVDLVAAQLVMNWWFPDTPGWIWSALFLGVIFLLNYISVRGFGEAEYWFSLIKVTTVIVFIIVGVLMIIGIFKGAQPAGWSNWTIGEAPFAGGFAAMIGVAMIVGFSFQGTELIGIAAGESEDPAKNIPRAVRQVFWRILLFYVFAILIISLIIPYTDPSLLRNDVKDISVSPFTLVFQHAGLLSAAAVMNAVILTAVLSAGNSGMYASTRMLYTLACDGKAPRIFAKLSRGGVPRNALYATTVIAGLCFLTSMFGNQTVYLWLLNTSGMTGFIAWLGIAISHYRFRRGYVLQGHDINDLPYRSGFFPLGPIFAFILCLIITLGQNYEAFLKDTIDWGGVAATYIGIPLFLIIWFGYKLIKGTHFVRYSEMKFPQNDKK

SEQ ID NO: 10497 - protein, 151 aa, Zea mays
MVKGVAVLAGPDVKGTIFFSQEGDGPTTVTGSISGLKPGLHGFHVHALGDTTNGCMSTGPHFNPAGKEHGAPEDENRHAGDLGNVTAGEDGVVNVNITDSQIPLTGPHSIIGRAVVVHADPDDLGKGGHELSKSTGNAGGRVACGIIGLQG

SEQ ID NO: 10498 - protein, 341 aa, Salmonella typhimurium LT2
MKALSKLKAEEGIWMTDVPEPEVGHNDLLIKIRKTAICGTDVHIYNWDDWSQKTIPVPMVVGHEYVGEVVGIGQEVKGFKIGDRVSGEGHITCGHCRNCRGGRTHLCRNTTGVGVNRPGCFAEYLVIPAFNAFKIPDNISDDLASIFDPFGNAVHTALSFDLVGEDVLVSGAGPIGVMAAAVAKHVGARHVVITDVNEYRLELARKMGVTRAVNVAKESLNDVMAELGMTEGFDVGLEMSGAPPAFRTMLDTMNHGGRIAMLGIPPSDMSIDWTKVIFKGLFIKGIYGREMFETWYKMAALIQSGLDLSPIITHRFSIDDFQKGFDAMRSGQSGKVILSWD

SEQ ID NO: 10499 - protein, 392 aa, Barnebya dispar
DLEPVNPADVPVTAAGALKSYKFAAKAISRLQSLPSGNIFLLCDVLVKEVRDLTGYDRVMVYKFHEDEHGEVVSECRRSDLESYLGLHYPATDIPQVSRFLFMKNKLRMICDCLAPPVKVIQDENLPQPLSLCGSTLRSPHGCHAQYMTNMGTIASLVMSVTINEDDDMKDCEQPQMPRKLWGLVVCHHTSPRFIPFPLRYACEFLIQVFGVQINKEVELAAQVREKHILRIQTLLCDMLLRDAPVAIITQSPNVMDLVRCDGAALYYKNEFWLLGVTPTEAQIRDIAEWLLECHSGNTGLSTDSLMEAGYPGASVLGDAVCGMAAISITSRDFLFWFRSHTAKEIKWGGAKHDPDDKDDGRKMHPRSSFKAFLEVVKWRSLPWEDIEMDAI

SEQ ID NO: 10500 - protein, 242 aa, Mesorhizobium loti
MAQNIYDQPDFFAGYSQLGRSIEGLDGAAEWPALRAMLPEVGGLRIVDLGCGFGWFCRWAHEHGASYVLGLDLSEKMLARARAAGPDTGITYERADLDKLHLPQDSFDLAYSSLALHYVEDVARLFRTVHQALSPGGHFVFSTEHPIYMAPARPGWAIDAEGRRTWPIDRYLVEGPRKTDWLAKGVVKHHRTVGTTLNALIRSGFAIEHVEEFCPTDAQITARPELAEELDRPMFLLVSARR

SEQ ID NO: 10501 - protein, 311 aa, Zea mays
  unsure (1)..(311): unsure at all Xaa locations
LEAGRGIDTNGGPTGRFFXGLTTVDVIAKLLGFDDLVPPFSEASGQQLLRGANFASAAAGIREETGQQLGARISFSGQVQNYQAAVQEVVSILGDDEAAAAAHLGRCVFTVGMGSNDYLNNYFMPALYSTGSRYTPERYADALAEQYAGALRAMYRYGARKVALVGVGQVGCSPNELAQRSSDGVACVEQINGAVRMFNRRLVGLVDGFNAILPGAHFTFVNAYGIFDDILANAASYGFTVTNAGCCGVGRNNGQVTCLPYQAPCANRDQHIFWDAFHPSEAANIIVGRRSYRAESPNDVYPMDISTLASI

SEQ ID NO: 10502 - protein, 652 aa, Zea mays
MEEHQVKPSDLPPTSLHNQDSAATPVTSADPARPAASNDSPSQVASAAPAAVSAPTAAPAEDAAGREASASVFSASGLSSWAKNLKIPQPSPGQESPTGKNTFARLTSGLGLRLSPKAAQQDEGAEGSTSPTTGQPGVFGSLTKGIVDSSKNAVKAVQVKARHMVSQNKRRYQEGGFDLDMTYITENIIAMGFPAGDLSSGLFGYFEGFYRNHMEEVIRFFEMHHKGKYKVYNLCSERLYDASLFEGKVACFPFDDHNCPPIQLVISFCHSAYSWLKEDIENVVVVHCKAGKARTGLMISSLLLFLKFFPTAEESIEYYNQKRCVDGKGLILPSQIRYVKYFERILTYFNGENQPPRRCMLRGFRLHRCPYWIRPSITVSNHNGVLFSTKKHPRTKELMPEDFWFSAPKKGIMVFALPGEPGLAEVAGDFKIQFHDRQGDFYCWLNTTMMENRVTLNPTDLDDFDKRKLPSPGFQIEVVLVDYDGSQPAKPKPGAGPAADKSHADSSASTVAKENSAAPEESNKGTGSNNDRDEVFSDSDGEDGSSNGRKEKTAGGGQSSVNAAKPSQTGNMEEAAASAAASRLDKVAISSEQGTTKAPDGTSLKTEVSSKASSTTAPPPPAADSSSMSEFKAIAADASVFSFGDEDDYESE

SEQ ID NO: 10503 - protein, 183 aa, Thermoplasma acidophilum
MDEIINKYYEKCLPFSIPYGISQSGDPCQFFRNGLSFPDISAIFRKGTEMCDFRSQMDDAIRTRIKEIMPNTADLVGPKLAMDLLERSRGLRRLALMPASSIQMLGAEKALFQSLGQGKKNPKYGVIFKFPGLSALNPKARGRIARIIANKVAITARADLLGTHVDSRSMREDIEEKIRKVKK

SEQ ID NO: 10504 - protein, 392 aa, Gaudichaudia albida
DLEPVNPADVPVTAAGALKSYKLAAKAISRLQSLPSGNISLLCDVLVKEVRDLTGYDRVMVYKFHEDEHGEVVSECRRSDLESYLGLHYPATDIPQASRFLFMKNKVRMIYDCLAPPVKVIQDKRLPQPLSLCGSTLRSPHGCHAQYMTNMGTIASLVMSVTVNEDDDTMDGDQQHMTKKLWGLVVCHHTSPRFVPFPLRYACEFLIQVFGVQINKEVELAAQVREKHILQIQTMLCDMLLRDAPVTIITQSPNVMDLVNCDGAALYFKNKTWLLGVTPTEEQIRGIAEWLLKYHSGNTGLSTDSLMEAGYPGASGLGDAVCGMAAVSITSRDFLFWFRSHTAKEIKWGGAKHDPDDKDDLRKMHPRSSFKAFLEVVKWRSMPWEDIEMDAI

SEQ ID NO: 10505 - protein, 159 aa, Medicago sativa subsp. falcata
MVLLISSEVSARDLTETTSDAKKEVVEKTNEVNDAKYGGGYNHGGGGYNGGGYNHGGGGYNNGGGYNHGGGGYNNGGGGYNHGGGGYNNGGGGYNHGGGGYNNGGGGYNHGGGGYNGGGYNHGGGGYNHGGGGCQYHCHGRCCSHAEFVAMQAKDNTQN

SEQ ID NO: 10506 - protein, 359 aa, Schizosaccharomyces pombe
MLVSSNEEQLTAHTPTSSSSIEPKILAACSYSLSVGPCSLAVSPKGVNSKSPSLKNETAFVVDSVSTLSAESSALLYNTQSSLLTGLSMNGYLGEYQEDIIHHLITREKNFLLNVHLSNQQPELRWSMRPALVNFIVEIHNGFDLSIDTLPLSISLMDSYVSRRVVYCKHIQLVACVCLWIASKFHETEDRVPLLQELKLACKNIYAEDLFIRMERHILDTLDWDISIPTPASYIPVLDPIFFLVLDASMFVPNLFKFPASKIACSVMNIVNEHVGSFLLTHPSMESYRKDDNFLWPEDLDTVTSYMENMSKRYANEECTDLLFSSLGRISSILAKKYPEQCAMAAWCNMTEKDTERTL

SEQ ID NO: 10507 - protein, 282 aa, Streptococcus pyogenes MGAS315
MAMIQWFPGHMSKARRQVQENVKHVDFVTILVDARLPLSSQNPMLTKIVGDKPKLMILNKADLADATRTKEWKAYYESQGIKTLAINSKEQSTVKKVTEAAKELIADKIKRLRDRGIQKETLRTMIIGIPNAGKSTLMNRLAGKKIAVVGNKPGVTKGQQWLKSNKELEILDTPGILWPKFEDELVGLKLALTGAIKDQLLPMDEVTIFGLNYFKTHYPSRLTKRFKNIPLEEEAPEIIMTLTRQLGFKDDYDRFYSLFVKEVRDGKLGQYTLDQVGDMDAD

SEQ ID NO: 10508 - protein, 849 aa, Brassica napus
MKGVRNIYHHSYTSFLLLFLVMILIHPALSIYINTLSSTESLTISSNRTLVSPGDVFELGFFETNSRWYLGMWYKKLPFRTYVWVANRDNPLSNSIGTLKISGNNLVILGHSNKSVWSTNLTRGIDRSTVVAELLANGNFVMRDSNNNDASQFLWQSFDYPTDTLLPEMKLGNDLKTGLNRFLTSWRSSDDPSSGEFLYELETGRLPEFYLSKGIFPAYRSGPWNGIRFSGIPDDQKLSYLVYNFTENSEEVVYTFRMTNNSIYSKLTVSLSGYFERQTWNASLGMWNVSWSLPLPSQCDTYRRCGPYAYCDVSTSPICNCIQGFNPSNVQQWDQRSWSGGCIRRTRLSCSGDGFTRMENMELPETTMAIVDRSIGVKECKKRCLSDCNCTAFANADVQNGGTGCIIWAGELEDIRNYAADGQDLYVRLAAADLVKRRNANGQIISLTVGVSVLLLLIMFCLWKRKQKRANANATSIANRQRNQNLPMNGMVLSSKREFLEEKKIEELELPLIELETVVKATENFSNCNKLGQGGFGIVYKGRLLDGQEIAVKRLSKTSVQGTDEFMNEVTLIARLQHINLVQIIGCCIEADEKMLVYEYLENLSLDSYLFGKTRRSKLNWKERFDIINGVARGLLYLHQDSRFRIIHRDLKVSNILLDKNMTPKISDFGMARIFARDETEANTVKVVGTYGYMSPEYAMHEIFSEKSDVFSFGVIVLEIVSGKKNSYNLNYKNNLLSYAWSQWEEGRALEIIDPVIVDSLPSTFQPQEVLKCIQIGLLCVQELAEHRPTMSSVVWMLGSEAKEIPQPKQPGHCIGRSPYDLDPSSSSQCDDDESWTVNQYTCSLVDAR

SEQ ID NO: 10509 - protein, 288 aa, Glycine max
MAATRAVTIASNSTCSLLAKKTFVGGTALSLNNLKFCRTRRSYTCRAIYNPLVVVKEEGQPETFDYRVFFVDKSGKKVSPWHDIPLRLGDDIFNFIVEIPKESSAKMEVATDESFTPIKQDTKKGKLRYYPYNIHWNYGLLPQTWEDPSFANSEVEGALGDNDPVDVVEIGERQRKIGEVLKVKPLGALAMIDEGELDWKIVAISLDDPKAPFVNDVDDVEKHFPGTLTAIRDWFRDYKIPDGKPANKFGLGNKAANKDYALKVITETNESWNKLIKRSIPAGELSLV

SEQ ID NO: 10510 - protein, 320 aa, Zea mays
  unsure (1)..(320): unsure at all Xaa locations
LLFPARRHRSSRRPSPLPVLLLHAADRSPRSLSLQPRRHEGRKYGTSVGTTQKRSRYLVAAMDHGGGGVGGSGIWIRAAVAVAAGAAIAARAVRRKSVDSSAVFVGVPAMVAHTVAGYRFAGLLLVFFFTSSRVTRVGEARKRALDPEFKEGGQRNWKQVLSNSGIASILVVLIASVTGGTDRCLDSKESTLVTALIDGVIGHYACYNGDTWSSELDILCKAEPQIITTFKXRKATIGGVTIDGLLAAAAGFLIGLAFVLIGFFTTQCDPDVFWNQLLAIPLXTAAALCRSLIDSFLSATVQYSGFYSVRKKVKPTKFNI

SEQ ID NO: 10511 - protein, 169 aa, Hordeum vulgare
MAAAASSASSVHDFTVKDASGKDVDLSTYKGKVLLIVNVASQCGLTNSNYTELAQLYEKYKDQGFEILAFPCNQFGGQEPGTNEEIVQFACTRFKAEYPIFDKVDVNGDNVAPVYKFLKSSKGSLFGDNIKWNFSKFLVDKDGNVVDRYAPTTSPLSIEKDIKKLLASS

SEQ ID NO: 10512 - protein, 547 aa, Neurospora crassa
MPPKGKAATKPKATETSQPSEPTTVLERSQQRYEKTRPFEAARQQKGLSKLPKEDQKGWICDQLLHLTNRLPAASRSSLLGPKASKEIWWTVNGTNSIVRGLKHKPKPHTTWGTDRNGHDVGSYTIERFDERFRKRIALTALQVSSRVFRENVEREKRGFVDARSGREIIVTEREIDEEKVRRSKMAALKKDLYGAITGKLAESVEWEDVVPIPHEEPEGALAAIIYPAEYAEAMSYLRAVMTTKEYSPRCLRLTEHIIAMNPAHYTVWLYRAANIFALGISIPDEIEWLNEVALANLKNYQIWHHRHLLVEHYYPTISSDPDALAQFAKQERGFLIAILSEDTKNYHVWSYRSWLVGKLGMWEDEEELKSIEKMIDEDVRNNSAWSHRFVLVFSNPKYATPGKAATEKDEKVPQELVEREVKYAQNKVYLAPQNQSPWNYMRGVLVKGGQPLASVQEFVEEFVNKLGEGEEEEEVKSTHALDLLAEIYAEKKENEKADLCLRRLAEKWDKIRGGYWEWRRKCLTQSETEKAPGEQVEKAEEGIAAA

SEQ ID NO: 10513 - protein, 353 aa, Schizosaccharomyces pombe
MSFDAEKQLAIAAVRRASYLTEKVFNQLIKEKSAAGALTKDDKSPVTIGDFGAQAIVISMLKDAFPNDPIVGEEDSDFLRENTQTCSRVWELVQETIQHATEYKELGQIKSAEEMMSIIDQGSYHGGRNGRMWTLDPIDGTKGFLRGAQYAICLALIENGKPVVSAIGCPNLPYDFNQPETSPKGIIMSAVRNHGCFQYSLHNEKLEPVQVHMQDVQNTKDSKFCEGVEAGHSMQGTQEEIAKYLGITRGPTKMDSQAKYASLARGDGDIYLRLPTKMTFEEKIWDHAGGSLLVEEAGGVVSDMFGKPLDFGVGRTLKNNNGVIAAYKGIFEKVIEATAAVTSKDPHFQKVAQ

SEQ ID NO: 10514 - protein, 473 aa, Bacillus megaterium
GAMTIKEMPQPKTFGELKNLPLLNTDKPVQALMKIADELGEIFKFEAPGRVTRYLSSQRLIKEACDESRFDKNLSQALKFVRDFAGDGLFTSWTHEKNWKKAHNILLPSFSQQAMKGYHAMMVDIAVQLVQKWERLNADEHIEVPEDMTRLTLDTIGLCGFNYRFNSFYRDQPHPFITSMVRALDEAMNKLQRANPDDPAYDENKRQFQEDIKVMNDLVDKIIADRKASGEQSDDLLTHMLNGKDPETGEPLDDENIRYQIITFLIAGHETTSGLLSFALYFLVKNPHVLQKAAEEAARVLVDPVPSYKQVKQLKYVGMVLNEALRLWPTAPAFSLYAKEDTVLGGEYPLEKGDELMVLIPQLHRDKTIWGDDVEEFRPERFENPSAIPQHAFKPFGNGQRACIGQQFALHEATLVLGMMLKHFDFEDHTNYELDIKETLTLKPEGFVVKAKSKKIPLGGIPSPSTEQSAKKV

SEQ ID NO: 10515 - protein, 519 aa, Candida maltosa
MVFTAFILEYWYFTLLSLAAGHFIGKHVYTNYLMRKHHAEPILDVVDDGAFGFKFGFQALKAKKIGKQIDLLFKKFNEAKHPSIGTFVTRSFGMQFIATKDPENIKAMLATQFNDFTLGQRLSYFAPLLGKGIFTLDGEGWKHSRAMLRPQFSRDQVGHVKMLEPHFQLLKKHIIKNKGSFFDIQELFFRFTVDSATEFLFGESVSSLKDESIGYDQEEIDFAGRKDFAEAFNKSQVYLSTRSLLQLLYWLVNSSDFKRCNKIVHKFSDYYIKKALTATPEELEKHSSYIFLYELAKQTRDPIVLRDQSLNILLAGRDTTAGLLSFAVFELGRNPEVWSKLREEIGDKFGLDPDSRIEDISFELLKLCEYLKAVINETLRLYPSVPRNGRFAAANTTLPHGGGPDGMSPILVRKGQTVMYSVYALQRDEKYYGKDANEFRPERWFEPEVRKLGWAFLPFNGGPRICLGQQFALTEASYVLVRLIQSFETLELSPDAPYPPAKLTHLTMCLFDGAPVRIE

SEQ ID NO: 10516 - protein, 482 aa, Saccharomyces cerevisiae
MVKRTVATNGDASGAHRAKKMSKTHASHIINAQEDYKHMYLSVQPLDIFCWGTGSMCELGLGPLAKNKEVKRPRLNPFLPRDEAKIISFAVGGMHTLALDEESNVWSWGCNDVGALGRDTSNAKEQLKDMDADDSSDDEDGDLNELESTPAKIPRESFPPLAEGHKVVQLAATDNMSCALFSNGEVYAWGTFRCNEGILGFYQDKIKIQKTPWKVPTFSKYNIVQLAPGKDHILFLDEEGMVFAWGNGQQNQLGRKVMERFRLKTLDPRPFGLRHVKYIASGENHCFALTKDNKLVSWGLNQFGQCGVSEDVEDGALVTKPKRLALPDNVVIRSIAAGEHHSLILSQDGDLYSCGRLDMFEVGIPKDNLPEYTYKDVHGKARAVPLPTKLNNVPKFKSVAAGSHHSVAVAQNGIAYSWGFGETYAVGLGPFEDDTEVPTRIKNTATQDHNIILVGCGGQFSVSGGVKLSDEDAEKRADEMDD

SEQ ID NO: 10517 - protein, 394 aa, Zea mays subsp. mays
  unsure (1)..(394): unsure at all Xaa locations
LGSARRARLPPGEMGWPLVGGMWAFLRAFKSGKPDAFIASFVRRFGRTGVYRSFMFSSPTVLVTTAEGCKQVLMDDDAFVTGWPKATVALVGPRSFVAMPHDEHRRIRKLTAAPINGFDALTGYLPFIDRTVTSSLRAWADHGASVEFLTEIRRMTFKIIVQIFLXGADQATTRALERSYTELNYRMRTMAIHMTDFAYRGALRARRRIVTVMQGVLDERRAARAKGVSGGGVDMMDRLIEAQDERGRRLDDDEIIDVLVMYLNAGHESSGHITMWATVFLQENPDMFARAKAEQEAIMRSILSSQRGLTLRDFSKMEYLSQVIDETLRLVNISFVSFRQATRDVFVHGYLIPKGWKVQLWYRSVHMDPQVYPDPTKLYPSRWEGHSPRPGTFL

SEQ ID NO: 10518 - protein, 153 aa, Magnetococcus sp. MC-1
MSNETMRNSWERGKAFLGSRYAILGGAMSWLSEHKLVAAISEAGGFGVLATGNMPPEMLRQEIQGVRKLTDKPFGVNLIALNPQLSELVEICQQERVSHVVVAGGFPDKSTIAALKEADIKIMLFAPNLPLAKRLITRGADALIIEGHEAGGH

SEQ ID NO: 10519 - protein, 517 aa, Candida tropicalis
MYEQVVEYWYVVLPLVFILHKVFDMWHTRRLMKQLGAAPVTNQLHDNFFGIINGWKHLSSRKKVELKNIMIINLPIRKFQVWVHMLVPSLEQSSSSQKIRRNIKALLATQFSDFSLGKRHTLFKPLLGDGIFTLDGQGWKHSRAMLRPQFAREQVAHVTSLEPHFQLLKKHMVKNKGGFFDIQELFFRFTVDSATEFLFGESVHSLKDETIGSYQDDIDFVGRKDFAESFNKAQEYLAIRTLVQDFYYLVNNQEFRDCNKLVHKFTNYYVQRALDATPEELEKQSGYVFLYELVKQTRGPNVLRDQSLNILLAGRDTSAGLLSFAVFELARNPHIWAKLREDVESQFGLGEQSRIEEITFESLKRCGYLKAFLNETLRVYPSVPRNFRIATKNTTLPRGGGSDGNSPVLVKKGEAVSYGINSTHLDPVYYGDDAAEFRPERWNEPSTRKLGWAYLPFNGGPRICLGQQFALTEAGYVLVRLAQSFDTLELKPPVVYPPKRLTNLTMSLQDGTIVKID

SEQ ID NO: 10520 - protein, 147 aa, Kluyveromyces lactis
MSQNLTEEQIAEFKEAFALFDKDNSGSISASELATVMRSLGLSPSEAEVADLMNEIDVDGNHAIEFSEFLALMSRQLKCNDSEQELLEAFKVFDKNGDGLISAAELKHVLTSIGEKLTDAEVDEMLREVSDGSGEINIKQFAALLSK

SEQ ID NO: 10521 - protein, 262 aa, Agrobacterium tumefaciens
MPPKRTLNRDSLSARHWPGDAQPPHSGRRNVGITVSVSAGIVGGLVNNRRVFPQIPADHLRQHPTILAKNSFVKGQPEHGAELADDLERLVALHGAETIAACIVEPVAGSTGVLVPPKGYLERLRAICDKHGILLIFDEVITGFGRMGSSFASNYFGVTPDIVTTAKGLTNGAIPMGASHSRKFHDALMHGPESQIELFHGYTYSGHPVPCAAGIATLDIYRDEGLFTRASELQDAWHDAIHSLKGSPNVIDIRNQSVSSPA

SEQ ID NO: 10522 - protein, 507 aa, Streptomyces avermitilis MA-4680
MSSTLFRTKKVEQSIQDTEEPEHALKKSLSALDLTVFGVGVIIGTGIFVLTGKVAKENAGPAVSLAFVAAGIACGLAALCYAEFASTVPVAGSAYTFSYASLGELPAWIIGWDLVLEFALGTAVVAVGWSGYVRSLLDNAGWHLPDYLSGREGATGFGFDILAAALVLVLTVILVIGVKLSARVTTVVVAIKVTVVMIVIIAGAFFISGDNYKPFVPKAEHVAAGSGVKSPLVQLMFGWAPTNFGVLGIFTAASVVFFAFIGFDVVATAAEETKNPQRDMPRGILGSLLICTTLYVAVSIVVTGMQKYTRLSIDAPLADAFKATGHPWYAGVISFGAAVGLTTVCMILLLGQTRVFFAMSRDGLLPRFFSRVHPRFRTPHRPTILLGVIIAIVAGFTSLSELAELVNIGTLFAFVVVAIGVIILRHTRPDLHRAFRTPLVPLVPILSVLASLWLMLNLPAETWIRFAVWMVIGFVVYFLYGRSHSRLGREQAAAAGRTPTPSGGDIE

SEQ ID NO: 10523 - protein, 474 aa, Rhodospirillum rubrum
MTLSIKPTLKKSLSGLHLWGIAVGLVISGEYFGWSYGWDQAGTLGFLVTTILIAVMYTTFIFSFTELTTAIPHAGGPFAYSYRAFGPLGGFLAGFATLIEFVFAPPAISLAIGAYLNVQFPGLDPKLAAVGAYVVFMALNIAGVTIAATFELLVTVLAIAELLVFMGVVSPGFSFTNFVANGWSGESGFSFGSLSGIFAAIPFAIWFFLAIEGAAMAAEETKDPRTTVPKAYIAGILTLVFLAFGTMIFAGGVGDWKALSNINDPLPQAMKVVVGESSGWLHMLVWIGLFGLIASFHGIIMGYSRQIFALARAGFLPAVFSTVHPSRKTPHWAILAGGVIGIAAIFSDSFISIGGLPLTANIVTMSVFGAIVMYIMSMAALFRLRQSEPALDRPFRAPFYPVFPAIALAMAVVALITMIYFNPMVFGLFVGLMAAGWLFYRFTAHLRAAAPGDGLLSVGGIETIAQTEARSLVD

SEQ ID NO: 10524 - protein, 445 aa, Acinetobacter baumannii
MSVTSVNPATNATNEYYLTRQSQMESNVRSYPRKLPLAIAKAQGCWVTDVEGTQYLDCLAGAGTLALGHNHPAVIQSIQDTLASGLPLHTLDLTTPLKDAFTEALLAYLPGGKEEYCLQFCGPSGADATEAAIKLAKTYTGRSSVISFSGGYHGMTHGSLAMTGNLSAKNAVNGLMPGVQFMPYPHEYRCPLGLGGEAGVDALTYYFENFIEDVESGVTKPAAVILEAIQGEGGVVTAPVKWLQKIREVTEKHNIVLILDEVQAGFARSGKMFAFEHAGIEPDVVVMSKAVGGGLPLAVLGIKRKFDAWQPAGHTGTFRGNQLAMGTGLVVLETIKEQNLAQNAQERGEFPCIGNVRGRGLMIGVEIVDERKPADRIGSHPADSQLAAAIQTACFNNNLLLEKGGRNGTVIRLLCPLIITQEECVEVIARFKKAVAEALVAVRGA

SEQ ID NO: 10525 - protein, 151 aa, Sulfolobus solfataricus
MTNLKAQKRLAASIAGVGINRIKVVEDYIEDVQSSLTRDEIRNLIKDGKIIVLKKVGISGGRLKERRKKRSLKSEGKKSGSRKGKKGARANSKQMWVKRVRKIRAYLKWLRDHKVIDRHTYRELYLKTKGGNYKGVSDVRNVLIQMGKIKG

SEQ ID NO: 10526 - protein, 1303 aa, Ceratodon purpureus
MSATKKTYSSTTSAKSKHSVRVAQTTADAALEAVYEMSGDSGDSFDYSKSVGQSAESVPAGAVTAYLQRMQREGLIQNFGCMVAVEEPNFCVIAYSENASEFLDLIPQAVPSMGEMDVLGIGTDIRTLFTPSSSAALEKAAATQDISLLNPITVHCRRSGKPLYAIAHRIDIGIVIDFEAVKMIDVPVSAAAGALQSHKLAARAITRLQALPGGDIELLCDTIVEEVRELTGYDRVMAFKFHEDEHGEVVAEIRRMDLEPYMGLHYPATDIPQASRFLLMKNRVRLIADCYASPVKLIQDPDIRQPVSLAGSTLRAPHGCHAQYMGNMGSIASLVMAVIINDNEEYSRGAIQRGRKLWGLVVCQHTSPRTVPFPLRSVCEFLMQVFGMQLNLHVELAAQLREKHILRTQTLLCDMLLRDAPIGIVSQTPNIMDLVKCDGAALYYGKRVWLLGTTPTENQIKEIADWLLEHHNDSTGLSTDSLADANYPGAHLLGDAVCGMAAAKITAKDFLFWFRSHTATEVKWGGAKHDPDEKDDGRKMHPRSSFKAFLEVVNKRSPPWEDVEMDAIHSLQLILRGSFRDIADSDTKTMIHARLNDLKLQGVEERNALANEMSRVLETAAAPILAVDSRGMINAWNAKIAQVTGLPVEEAMHCSLTKDLVLDESVVVVERLLSLALQGEEEQNVEIKLKTFGTQTTERAVILIVNACCSRDASDFVVGVFFVGQDVTEQRMFMDRFTRIQGGEKTTVQDPHPLMRPSFDGDEFGRTFKRNSALGGLKDHATGSVERLDLYLRRAEECMEVMETIPSPKFNNKQCQYLAGKLKAVLQSASLFLRISHHEHHELGASIDMGRHVEIFKLLLALAKEIESFIQGCCKDEWIKAAMTLTNVSEYVSSMGFNLELCKIAFCKSCAASGSLTLDQIEVICKDEAEVVKRNASIDVDTLFAKVIYDLTEKTLSSDQNDLAIYLLQRLKRAKPILPSFSSRPSWWNFYDDWSFSEKFFQWIQITGSLGSGSSATVEKAVWLGTPVAKKTFYGRNNEDFKREVEILAELCHPNITSMFCSPLYRRKCSIIMELMDGDLLALMQRRLDRNEDHDSPPFSILEVVDIILQTSEGMNYLHEKGIIHRDLKSMNILVKSVKVTKSEIGYVHVKVADFGLSKTKDSSTRYSNQTWNRGTNRWMAPEVINLGYESTEGEISFDGKVPKYPLKSDVYSFGMVCYEVLTGDVPFPEEKNPNNVKRMVLEGVRPDLPAHCPIELKALITDCWNQDPLKRPSFAVICQKLKYLKYLLMTGKLSSHSYLTSK

SEQ ID NO: 10527 - protein, 438 aa, Oryza sativa
  unsure (1)..(438): unsure at all Xaa locations
PPIPIPYLIPPIPKSSKPDSTQTLLSSPAMNAPIVPRTSTRRPPPPPLTASASAARASLSAASRAVVEDEARYIVGTYNRSRVVLVAGRGCKLYDADGREYLDMAAGIAVNAVGHADPDWVAAVSAQAATFVHASNVQYTVPQVALAKRLVEASFADRVFFANTGTEANEAAIKFARKYQRVARPDGDAPTEFMSFTNCFHGRTMGSLALTSKVQYREPFAPVMPGATFAEYGNLEEAKKVIQSGKIAAVFVEPMQGEGGIHSATKEFLQGLRDACDEAGALLVFDEVQCGLGRTGYLWAYEAYGVVPDIMTLAKPLAGGLPIGVVLVTEKVASAINYGDHGTTFGGGPLVCQAALTTLDKIQKPGFLAEVAKKGENFKQLLSTKLSGNAHVKEIRGIGLIVGIELDVPAGPLVDACLDRGVIVLTAGKGNVVRQCCX

SEQ ID NO: 10528 - protein, 612 aa, Oryza sativa
  unsure (1)..(612): unsure at all Xaa locations
GGGFPSLMRRKQVDSDRVQGEGHQLAKELNIPALVAIGVGSTIGAGVYVLVGTVAREHAGPALTISFLIAGIASALSAFCYAELASRCPSAGSAYHYSYICVGEGVAWLIGWALVLEYTIGGSAVARGISPNLALFFGGPDSLPWILSRHQLPWFDVIVDPCAAALVFVVTVLLCVGIKESSAVQELITVLNACVMIFVIVAGSYIGFQIGWVGYKVTDGYFPHGINGMLAGSATVFFAYIGFDTVASTAEEVKNPQRDLPLGIGAALSICCCLYMMVSVVIVGLVPYFAMDPDTPISSVFAKHGMQWAMYIVTSGAVLALCSTLLGSLLPQPRILXMAMARDGLLPSFFADVNKRTQVPVKSTVVTGLCAAALAFFMDVSQLAGMVSVGTLLAFTIVAVSILILRYIPPDEVPLPSSLQETFCLSQEYDEERVSGILGDERCKTSETKDVILAESMEDSAGKMDEMKRRKVAAFSIGSVCVGVMVLTSAASATWLPFLPMCIGCIVGALLLVAGLGLLCWIDQDDGRHSFGQSGGFTCPFVPLLPVLSILVNTYLLINLGGEAWMRVGIWLLIGVLVYILYGRTNSSLKDVIYVPVAXADEIYKSSSGYVS

SEQ ID NO: 10529 - protein, 139 aa, Glycine max; identical to SEQ ID NO: 1310

SEQ ID NO: 10530 - protein, 475 aa, Glycine max
  unsure (1)..(475): unsure at all Xaa locations
MMALNISSPAEVKSIFFADYFKSNCITAKFTGGFAFKRKERGAASGGRVCCSVLAPPPPPAWPGRAVPEQGSKTWDGPKPISIVGCTGSIGTQTLDIVAENPDKFKVVALAAGSNVTVLADQVKRFKPQLVAVRNESLIAELKEALHDVEEKPEIIPGEQGXIEVARHPDAVSVVTGIVGCAGLKPTVAAIEAGKYIALANKETLIAGGPFVLPLAQKHNVKILPADSEHSAIFQCIQGLPEGALRRVILTASGGAFRDWPVDKLKDVKVADALKHPNWNMGKKITVDSATLFNKGLEVIEAHYLFGADYDHIEIVIHPQSIIHSMIETQDSSVLAQLGWPDMRLPILYTLSWPDRIYCSEDTWPCLDLCKIGSLTFKTPDNVKYPSMNLAYAAGRAGGTMTGVLSAANEKAVEMFIDEKISYLDIFKVVELTCEKHQNELLSSPSLEEIIHYDLWAREFAASLQDSSSFTPILA

SEQ ID NO: 10531 - protein, 511 aa, Triticum aestivum
  unsure (1)..(511): unsure at all Xaa locations
SPPLPPACSTGANPPPLSPASSAPPPRLLVPARGSAANPSRLGSEGERAAAAHPPLRIEQVQSPSKKQRIATHTHIKRLGLDANGTAIAMSAGFVGQAAAREAGGLEVDMIRQENMAGRALLLAGPPATGKTALALGISQELGSILPFCPAGGSXEVYSSDVKSTEGLMVISRRGIGLRMKENEVVYEGEVTELSPEESESSRGGYGKSMRRVVIGLKTAKGTKLLKLDPTIEVVLIVEKGAAGEVIYIEANSGAVKRVGRCDAFATEYDLEAEEYVPIPKGEVHKKKEIVQDVTLHDLDAANAQPQGGQDILSLMGQMMKSRKTEITEKLRQEINKVVNRYIDEGIAELVPGVLFIDEVHMLDIECFSYLNRALESPLSPFVILATNIWICTVRGTDMTSPYGIPVDLLDRLVIVRTQIYGPIEMIQILAIRAQVEEIEIDEDSLAFLGEVGQQTSLRHAIQLLSPASVVAKANGREKICKADLEEVRVLYLDAKSSAQLLHKQQGSYIT

SEQ ID NO: 10532 - protein, 361 aa, Corynebacterium glutamicum ATCC 13032
MAVMAYQPADNRYDDMIYRRVGNSGLKLPAISLGLWHNFGDDKPLSTQRSIIHRAFDRGVTHFDLANNYGPPAGSAETNFGRILREDLKSHRDELIISSKAGWDMWPGPYGFGGSRKYLVSSLDQSLTRLGLDYVDIFYHHRPDPDTPLEETMYALRDIVASGKALYVGISSYGPELTAEAAEFMAEEGCPLLIHQPSYSIINRWVEEPGDDGENLLQSAANNGLGVIAFSPLAQGLLTDKYLDGIPEGSRASQGKSLSEGMLNVNNIDMVRKLNDIAQERGQSLAQMALAWVLREQGEYGADTVTSALIGASSVEQLDNSLDSLNNLEFSDAELEAIDEISHDAGINIWAKATDSKTREN

SEQ ID NO: 10533 - protein, 161 aa, Lactobacillus plantarum WCFS1
MAESVYDFTETEMSGAPLDLSQYRGQVLLIVNTASNCGLAPQFKGLEELYQKYQQEGLVVLGLPSNQFHQEKADDDETHDYCQRHYGVTFPMTKRVMVNGDDADPLFTYLKQAAGHGRIKWNFTKFLIGRDGRVLERYAPTTRPATFEAAIRDALADRSED

SEQ ID NO: 10534 - protein, 341 aa, Nostoc sp. PCC 7120
MLAALLYGQEDLRLEQVADPSPDVGEVVIKVGAATTCGTDLKVWRRGGHAKMLKLPTLFGHEAAGEIVAVGADVTGWQIGDRVVANNSAPCMKCFFCQRQEYSLCPNLTWNNGTFAEYLKIPAPIVQHNLLQVPDELPLSLAAMTEPLACVLHGVARSHIKPQDRVVVLGDGAIGLMFVAVLADKVEVLLWGGNDQRLEIGQKLGATKTFNYHQNPDIPHVVKELTQGWGADVVIEATGVPSVWETAIACARPGAIVNLFGGCPRDTTITVNTEQLHYSELTLKGVFHNTPEYVRAALALIASRKIPFELLISEQRPLKDLEQVFYDMKARKVIKVAMVCS

SEQ ID NO: 10535 - protein, 92 aa, Zea mays
KEKRHKKKQENADPNRPKRPASSFLLFSKEARKQLLEERPGINNSTLNALISVKWKELSGEERQAWNAKAAPAMAAYKKEMEEYTKAQSSSA

SEQ ID NO: 10536 - protein, 496 aa, Escherichia coli K12
MITEFVFIPIFAIAAGVAQSLQYLNRYHVIREPPEHILNRLPSSASALACSAHALNLIEKRTLDHEEMKALNREVIEYFKEHVNPGFLEYRKSVTAGGDYGAVEWQAGSLNTLVDTQGQEFIDCLGGFGIFNVGHRNPVVVSAVQNQLAKQPLHSQELLDPLRAMLAKTLAALTPGKLKYSFFCNSGTESVEAALKLAKAYQSPRGKFTFIATSGAFHGKSLGALSATAKSTFRKPFMPLLPGFRHVPFGNIEAMRTALNECKKTGDDVAAVILEPIQGEGGVILPPPGYLTAVRKLCDEFGALMILDEVQTGMGRTGKMFACEHENVQPDILCLAKALGGGVMPIGATIATEEVFSVLFDNPFLHTTTFGGNPLACAAALATINVLLEQNLPAQAEQKGDMLLDGFRQLAREYPDLVQEARGKGMLMAIEFVDNEIGYNFASEMFRQRVLVAGTLNNAKTIRIEPPLTLTIEQCELVIKAARKALAAMRVSVEEA

SEQ ID NO: 10537 - protein, 302 aa, Brassica rapa subsp. oleifera
GDIRAAIPKHCWVKSPLRSMSYVARDICAVVALAVAAVYVDSWFFWPLYWAAQGTLFWAIFVLGHDCGHGSFSDIPLLNTAVGHILHSFILVPYHGWRISHRTHHQNHGHVENDESWVPLPEKLYKNLSHSTRMLRYTVPLPMLAYPLYLWYRSPGKEGSHYNPYSSLFAPSERKLIATSTTCWSIMLATLVYLSFLVGPVTVLKVYGVPYIIFVMWLDAVTYLHHHGHDDKLPWYRGKEWSYLRGGLTTIDRDYGIFNNIHHDIGTHVIHHLFPQIPHYHLVDATKAAKHVLGRYYREPKT

SEQ ID NO: 10538 - protein, 359 aa, Lycopersicon esculentum
FISPDIAKIRKLVRQSKCLQDKMTAKESATWLAIINQEEVLARELYPDRCPPLSSGGSSGTFTMNDSSEYDVEGAIDDPIFDVQEQKPNHLSLLNVNVEMFKEKLPLLQQSQPMKGDIFANLDFTRKRKPADDLTFLMDPKTYTCECLHCPHSELRNGFPDRSSRDNHQLTCLFRNTSQFVVPNFHMEEVKPVVFPQQYVEPKRASLPVNPAPPSFDTSGLGVPADGQRVINELMSFYESNVQGNKSSMAGNSVMSKEQPLQQPSIQQNNYLQSQGNVLEGSIFGDTNISASNSMFVQGDRFDQSKVLTSPFNASSTDDFNFMFGSPFNMQSTDLSECLSGISHDDVKQQDVPVITSEF

SEQ ID NO: 10539 - protein, 82 aa, Zea mays
  unsure (1)..(82): unsure at all Xaa locations
PNLDLCKLXSLTFRASDNLKYPSMDLAYAAGRAGGTMTGVLSAANEKAVELFIDEKYDPFFCISTFTCFVLDKSLHIFHVIL

SEQ ID NO: 10540 - protein, 153 aa, Zea mays
  unsure (1)..(153): unsure at all Xaa locations
MAGMTDMPMRPARPGPPMQHRGPPPMARLRPEPIDREKTCPLLLRVFTRVAGHHQNEEFSVRGKEPKDEVQIYTWKDATLRELTDLVKEVALPARKRNARXLSFAFVYPDKNGRFVVRQVGSTFAYGHGRGDDAKTLAELGFQIGDYLSVAIM

SEQ ID NO: 10541 - protein, 158 aa, Nitrosomonas europaea ATCC 19718
MNIYDCGIKTMDGQDKLLGDYKGKVLLIVNTASKCGFTPQYQGLEDLYRRYKDRGFVVLAFPCNQFGHQEPGSESEIQQFCTTRYDVSFPVFAKIEVNGANTHPLYRYLKNEKSGVLGTKAIKWNFTKFLVDRSGHVVRRYAPADKPESLTGDIEQLL

SEQ ID NO: 10542 - protein, 142 aa, Zea mays; identical to SEQ ID NO: 790

SEQ ID NO: 10543 - protein, 305 aa, Miscanthus sinensis var. formosanus
IESVGEGVTDVAPGDHVLPVSTGECKECPHCKSAESNMCDLLRINTDRGVMIGDGKSRFSINGKPIYHFVGTSTFSEYTVMHVGCVAKINPQAPLDKVCVLSCGISTGLGASINVAKPPKGSTVAIFGLGAVGLAAAEGARIAGASRIIGVDLNPSRFEEARKFGCTEFVNPKDHKKPVQEVLAEMTNGGVDRSVECTGNINAMIQAFECVHDGWGVAVLVGVPHKDAEFKTHPMNFLNERTLKGTFFGNFKPRTDLPNVVELYMKKELEVEKFITHSVPFAEINKAFDLMAKGEGIRCIIRMEN

SEQ ID NO: 10544 - protein, 363 aa, Streptomyces avermitilis MA-4680
MVVPHEVRAVVAVKKGAPVEVQTIVVPDPGPGEVLVAVQACGVCHTDLHYREGAITDDFPFLLGHEAAGTVEAVGAGVTDLAPGDYVVLAWRAPCGSCRSCRRGRPWYCFDSRNATQPMTLLDGTPLSNALGIGAFAEKTLVAAGQAVKIDPAARPEAAGLIGCGVMAGYGAAVNTGKVGRGDTVAVIGCGGVGNAAIAGACLNGAMKVIAVDIDDKKLDQAEKFGATHTVNSRGTDPVEAVRALTDGFGVDIAIDAVGRPETYKQAFYMRDHAGTLVQVGVPDPEMKIDLPLIDLFSRGGALKSSWYGDCLPSRDFPFLIDQYLYGLLDLNAFVSETISLEQVEEAFAKMHRGEVLRSVVVL

SEQ ID NO: 10545 - protein, 654 aa, Triticum aestivum
  unsure (1)..(654): unsure at all Xaa locations
MMGGGLLMDQGMAFSGVHNFVDLLQQNGADKNLGFGSLMPQTSSGDQCVMGEGDLVDPPTNNFPDAGEDDSDDDVDDIEELERRMWRDRMKLKRLKELQQSRGKEQAAGGGGAGDGLKPRQSQEQARRKKMSRAQDGILKYMLKMMEVCRAQGFVYGIIPEKGKPVSGASDNLRAWWKEKGRFDRNGPAGIAKYQADNAVPGSESELASGTASPHSLQELQDTTLGSLLSALMQHCDPPQRRFPLEKGISPPWWPSGDEEWWPELGIPKDQGPPPYKKPHDLKKAWKVSVLTAVIKHMSPDIEKIRRLVRQSKCLQDKMTAKEISTWLAVVKQEEELFMRLHPGARPPASAGGIASAISFNASSSEYDVDVADDCKGDEAGTHKMAMADPTAFNLGAAILNDKFLMQAPMKEETADMEYVQKRSAVAAEPELMLNNRVYTCNNVQCPHSDYGYGFLDRNARTNHQYTCKYNDPLPPSAENKAAPPAPPQVFPAAYNQPNHGLNNLDFGLPMDGQRSIAELMNMYDTAFPANNKNMGNDDVTIIERPNAITPVTQMDEGFFGQGNGIGGNGDSMFSDVSNMMQQQQQQQHNSRSSSSSSXAPAQQQFFIRDDAQAQFGNQMGSISGASDFRFGSGFNMSGTVDYPQKNDGPNWYY

SEQ ID NO: 10546 - protein, 85 aa, Triticum aestivum
RSSPPRPPAPSAMDDSAQLQRFIEQEKERMMVSEMIGKVTSECWDKCITGAPGSKLSSGETSCLSNCAQRFVDMSEIIAKRFGAH

SEQ ID NO: 10547 - protein, 82 aa, Glycine max
MRKNYLTNDIHVSQRIGSNVTKGDNLDDNTVDSATYNVKSSNVKEPVRSPTSLVFGYLNLFSDGVHNFTDGMALGSAFLLYG

SEQ ID NO: 10548 - protein, 340 aa, Zea mays
  unsure (1)..(340): unsure at all Xaa locations
MVHCAKCNIEWNKNDGIFLVEVNRLLRPGGYFVWTSNLNTHRALRDKENQKKWTAIRDYAEGLCWEMLSQQDETIVWKKTNKRECYKSRKFGPELCGHDPESPYYQPLSPCISGTRSQRWIPIEHRTTWPSQARQNATELDIHGVHSEVFADDNSSWDTMVRNYWSLLSPLIFSDHPKRPGDEDPQPPFNMLRNVLDMNAHFGGFNAALLQVXKSVWVMNVVPTNAPNYLPLIFDRGFIGVXHDWCDAFATYPRTYDMVHADGFLSLEKTHKHRCSTLDIFLEVDRILRPEGWVIIRDTAPLIEAARSVXTQLRWDARILDLDIASDEKLLVCQKPFLRK

SEQ ID NO: 10549 - protein, 446 aa, Glycine max
MSRHQGGNADDMADEFEMEDVEDDMDDESIDRERGGVESDIDDYDHSSGKGVDTTAAQARRGQDIQGIPWDSLNITRERYRQTRLEQYKNYENIPGSGDKSGKDCKNTKKGYSFYDFRKNSRSVKSSILHFQLRNLVWATSKHDVYLISQFSIMHWSSLTCKSSEVLNVSGHVAPSERHPESLLEGFTHTQVSTLAVKEKLLVVGGFQGELIFKHLDRPGVSFCTRTTYDDNAITNAIEIYDCPSGAVHFTAANNDSGVRDFDMEKFQLSKHFCFPWPVNHTSLSPNGKLLLIVGDNPECMLVDSQNGKTIVPLSGHFDYSFASSWHPDGVTFATGNQDKTCQIWDLRNLSKSVAVLQSNLGAIRSIKYTSDGRYMAVAEPADFVHVYDVKSGYENEQEIDFFGEISGISFSPDTESLFIGVWDRTYGSLLEYGRRRYYAYLDSLT

SEQ ID NO: 10550 - protein, 429 aa, Brassica rapa
HNSYTFSFLLVRFVLILFRPAFAINTLSSTESLTISTNRTLVSPGDVFELGFFRTNSRWYLGMWYKKLPYRTYVWVANRDNPLSSSIGTLKISGNNLVLLGHSNKSVWSTNLTRGNERSPVVAELLANGNFVMRDSNINDASGFLWQSFDFPTNTLLPEMKLGFKLKTGLNRFLTSWRSSNDPSSGNFSYKLEAQRLPEFYLWNEKFPWHRSGPWNGIEFSGIPEDKELSYMVYNFTENSEEVAYTFLMTNNSIYSRLTINSAGYFQRLTWDPLLGMWNVFWSSPVDLQCDSYRRCGPYAYCDVTTSPVCNCIQGFNPSNVQQWDIRDWSAGCIRRTRLSCSRDGFTRMKNMKLPETTMAIVDRSIGVKECEKRCLSDCNCTAFANADIRNGGTGCVIWTGELEDMRSYATGATDSQDLYVRLAAADIV

SEQ ID NO: 10551 - protein, 250 aa, Mesorhizobium loti
MLLKGKAAVISGAASPRGIGRSTATLMAEQGARIAILDLDEGQARDAAASLGPEHIGLACNVADLDACKKAAAEVTEVFGKVDVLCNIAGITQPVKTLDIGPADWDRILDVNLRGVLYLSQAFIPHMRENGGGSIICMSSVSAQRGGGIFGGPHYSAAKAGVLGLAKAMAREFGPDGIRINCVTPGLIQTDITGDKLTDAMRADIIKGIPLSRLGDARDVAGAYLFLASDLASYITGAVIDVNGGMLIHG

SEQ ID NO: 10552 - protein, 426 aa, Vigna aconitifolia
MFKPHLLAVVSRCNSFFGCVDICCNWGNSAPRTLKGLKSVTSEQVFEREQKYGAHNYHHCSAYRAKGVSLDMEGKRYFDFLSAYSAVNQGHCHPKIVNTMVEQAQRLTLTSRAFYTDVLGEYEEFLTKLFNYDKVLPMNTGVEGGETACKIARCWAYMKKKVPENQAKIIFAENNFWGRTLSAISASTDPMSYDELRPYMPGFEIVKYNDTAALEKAFQDPNVCAYMVEPIQGEAGVVALDAGYLTEVRELCTKYNVLFIADEVQTGLARTGRMLAVDHEDVKPDLLILGKALSGGLYPVSAVLRDDHIMDCIQPGLHTAMDVMDPRMRILAASRYYVRVARERCENAQIQATYLRKELNTLPKDVVPVVRGKGLLNAIVINKKFDAWDVCLNLCKPTHGDIIRFATTGHHRGTDPRMCQYYQKYH

SEQ ID NO: 10553 - protein, 472 aa, Emericella nidulans
MPTLGGLLKKRRTRDSQDLSKELQAGSTTTGHTTTSPIAAEDSQSQQHHGHHGGHHFFHHNHHNHQPSNNSANSANSQNSHAAKHHQFDQSSATSNQPSDGQTASMQSPAQQPSSTSAHSNSGHHSNAASIHNIIHPSQQNTPQVSRAERTTKGKYTLDDFAIQRTLGTGSFGRVHLVQSKHNHRYYAIKVLKKAQVVKMKQIEHTNDERRMLNRVRHPFLVTLWGTWQDARNLYMVMDFVEGGELFSLLRKSQRFPNPVAKFYAAEVTLALEYLHSLNIIYRDLKPENLLLDRHGHLKITDFGFAKEVPDITWTLCGTPDYLAPEVVASKGYNKSVDWWSLGILIFEMLCGFTPFWDQGSPVKIYQNILAGRIKFPPYLHPDAVDLLSRLITSDLTKRLGNLHGGPDDIKNHPWFAEVTWDRLLRKEIDAPYVPPIRGGQGDASQYENYQEESEPYGQAGEDPHGHLFPDF

SEQ ID NO: 10554 - protein, 212 aa, Glycine max
MVSLKLQKRLAASVLKCGRGKVWLDPNEVNEISMANSRQNIRKLVKDGFIIRKPTKIHSRSRARRMKEAKRKGRHSGYGKRKGTREARLPTKILWMRRMRVLRRLLRKYRESKKIDKHMYHDMYMKVKGNVFKNKRVLMESIHKSKAEKAREKTLSDQFEAKRAKNKASRERKNARREERLAQGPGERPPAAQTATPATASQPPRASKKSKK

SEQ ID NO: 10555 - protein, 491 aa, Brassica napus
  unsure (1)..(491): unsure at all Xaa locations
MAASYEAERDVQKNYWIEHSADLTVEAMMLDSRAADLDKEERPEVLSLLPPYEGKSVLELGAGIGRFTGELAQKAGELIALDFIDSVIKKNESVNGHYKNVKFMCADVTSPDLNITDGSIDLIFSNWLLMYLSDKEVELLVERMVGWIKVGGYIFFRESCFHQSGDSKRKSNPTHYREPRFYTKVFQECVTRDAAGNSFELSMIGQKCIGAYVKNKKNQNQICWIWQKVSSENDRGFQRFLDNVQYKSSGILRYERVFGQGFVSTGGIETTKEFVEKMDLKPGQKVLDVGCGIGGGDFYMAENFDVHVVGIDLSVNMISFALERAIGLNCSVEFEVADCTTKHYPENSXDVIYSRDTILHIQDKPALFRTFFKWLKPGGKVLISDYCKSSETPSPEFSEYIKQRGYDLHDVQAYGQMLKXAGFNDVIADDRTDQFMQVLRRELERVEKEKEEFISDFSKEDYEDIVGGWKAKLERSASGEQKWGLFIANKN

SEQ ID NO: 10556 - protein, 134 aa, Glycine max
  unsure (1)..(134): unsure at all Xaa locations
MSTLDATRAELGLLVLYLGKAEARDKICRAIQYGSKFLSNGEPGTAQNVDKTTSLARKVFRLFKFVNDLHALISPTPQGTPLLLILLGKSKNALLSTXLFLDQFVWLGRTGIYQNKERTELIGRISLYCWLVAS

SEQ ID NO: 10557 - protein, 361 aa, Triticum aestivum
  unsure (1)..(361): unsure at all Xaa locations
MVSAVLRTILVTGGARYIGSHTVLQLMLRGFRVLVVDXLDNPSEDPIRLRPGNSPTPLQNSLDLQQGGTFVRREGAGRNHPRTEASRPPYTHVXGAGKPKGEAVQKLLPYYDNHVIGQLHPAPSRGRAHGCDTLVFXSSATVYGXHPTRCPCTEEFPLSATNPYGRTKLVIEDICRDLQRSDPDWKIILLRYFNPVGAHPSGYIGEDPLGVPNNLMPYVQQVAVGRRPALTVYGTDYNTKDGTGVRDYIHVVDLADGHIAALRKLYEDSDRIGCEVYNLGTGKGTSVLEMVAAFEKACGKKIPLVYAGRRAGDAETVYAATAKAEKELKWKAKYGVEEMCRDLWNWASKNPYGYGSSDNGH

SEQ ID NO: 10558 - protein, 337 aa, Streptomyces coelicolor A3(2)
MTRRQRVAENLNSALHHLLGAHPGTYLIGEDVADPYGGAFKVTRGLSDRFPDRVLSSPLSEGGIAGVGAGLALAGNRSVVEMMFSDFAALAFDPLLNFAAKSVSMYGRRVPMSMVVRCPTGGNRGYGPTHSQSLQKHFLGIPSLHLREVSPFHDNRRVLTAMLDREEPGVLFEDKVLYTRAMYQAGVVDDLFRYEVLADPSETARVFAPDCGPPDWIVLAPGGLTERAVTALRTLLLEEEITCELLVPSQLYPFDSKALLPVLSRADRICVMEDSTADGTWGELLAQQLHEELWSRLARPVLPLTAEPSIVPTAAHLEHGVLLQPSTIHRAIVEATK

SEQ ID NO: 10559 - protein, 290 aa, Saccharomyces cerevisiae
MEKLLQWSIANSQGDKEAMARAGQPDPKLLQQLFGGGGPDDPTLMKESMAVIMNPEVDLETKLVAFDNFEMLIENLDNANNIENLKLWEPLLDVLVQTKDEELRAAALSIIGTAVQNNLDSQNNFMKYDNGLRSLIEIASDKTKPLDVRTKAFYALSNLIRNHKDISEKFFKLNGLDCIAPVLSDNTAKPKLKMRAIALLTAYLSSVKIDENIISVLRKDGVIESTIECLSDESNLNIIDRVLSFLSHLISSGIKFNEQELHKLNEGYKHIEPLKDRLNEDDYLAVKYVL

SEQ ID NO: 10560 - protein, 353 aa, Triticum aestivum
  unsure (1)..(353): unsure at all Xaa locations
MCLYSSPPTSPNKTPPPHSSEPAAGMPQDSRPPGMRLFGVTIAPAPAPQLDPPDGDRDPSPNPPVAVREDVMRKCKSMGNLATLASACPSGDAGGAGDGYLSDGGLLQSSGKRRRAQERKKAVPWTEEEHRTFLAGLEKLGKGDWRGIXKNFVTTRTPTQVASHAQKYFLRQTNPNKKKRRSSLFDMMASDLSPAPNCPILPPTMAKFHDMVTMTNQLQNSSLEGVSSSNAANLAKQVTRDLPPPVPSFTATNVDGSLSIMNHMDCFSRVPSLFRPIPIVPEGTPPSAPATANTSALTFEANLTSCTSAFLIPRSGPSPLPPATTAKTDHLGLFGCRSGKVEGKNGWLFSYGW

SEQ ID NO: 10561 - protein, 391 aa, Sinorhizobium meliloti
MASGDDLKRRLTILGSTGSIGTSTLDVIERLGGRDRFEIAALTGNGNIPLLAEQARRIGAELAVTADEDRYGELKDALSGSGIEVAAGRSGLTEAAERDAGWVMAAIVGNAGLGPTLAAARRGADIALANKECLVSAGSLFIDAVAEGGGRLLPVDSEHNAIFQVLENDQRHAVERIVLTASGGPFRTKTLDEMRHVTADVARAHPNWSMGLKISIDSASMFNKALEMIEARHLFRLRPEQIEVIVHPQSVVHSMVGYTDGSVLAQLGCPDMRTAIGYALSYPKRCDLPVERLDFARLARLDFEAPDEVRFPAIKLARRAMEEGGVQGAVLNGAKETALDAFIKGRIGFLAMAEIVEKVMDGLAGLPAATSMDDVFAADERARRAAAEMIR

SEQ ID NO: 10562 - protein, 366 aa, Ralstonia eutropha
MTAMMKAAVFVEPGRIELADKPIPDIGPNDALVRITTTTICGTDVHILKGEYPVAKGLTVGHEPVGIIEKLGSAVTGYREGQRVIAGAICPNFNSYAAQDGVASQDGSYLMASGQCGCHGYKATAGWRFGNMIDGTQAEYVLVPDAQANLTPIPDGLTDEQVLMCPDIMSTGFKGAENANIRIGHTVAVFAQGPIGLCATAGARLCGATTIIAIDGNDHRLEIARKMGADVVLNFRNCDVVDEVMKLTGGRGVDASIEALGTQATFEQSLRVLKPGGTLSSLGVYSSDLTIPLSAFAAGLGDHKINTALCPGGKERMRRLINVIESGRVDLGALVTHQYRLDDIVAAYDLFANQRDGVLKIAIKPH

SEQ ID NO: 10563 - protein, 161 aa, Pseudomonas aeruginosa PAO1
MSDSLLSIPCTTIKGEQKTLADFGGKALLVVNTASKCGFTPQYQGLEALWEKYRERGLVVLGFPCNQFGKQEPGDEGEISQFCELNYGVSFPLFRKIEVNGAGAHPLFVSLKKRAPGLLGSQGIKWNFTKFLIGRDGQVVKRYAPTTKPEELSSAIEALLE

SEQ ID NO: 10564 - protein, 705 aa, Oryza sativa
  unsure (1)..(705): unsure at all Xaa locations
LGDLRFEPLERVRYTRDQLVELHEIIDIPENILKLKQDIDIELHGEDEPWINNDSSVQTQSYNRYAETDNRDWRSRIEQPVQTPAIGGEEKSWDKFREAKESYNQVGPAPALVKAEVPWSIQRGNLSNKERVLKTVKGILNKLTPEKFDLLKGQLIEAGITTADILKDVISLIFEKAVLEPTFCPMYAQLCFDLNEKLPSFPSEEAGGKEITFKRVLLNNCQEAFEGADNLRSEVNKLTGLDQEMERRDKERRVKLRTLGNIRLVGELLKQKMVPEKIVHHIVQELLGSESNRCPAEENVEAICQFFNTIGKQLDENPKSRRFNDVYFNRLKDLTTNSQLASRLRFMARDVLDLRSNQWVPRREEMKAKKFSEIHREAENNLGLRPGSTASIRTGRTGTGGGGPLSPGAFSMNQPGIVGMLPGMPGARKMPGMPGLGSDDWEVPHSRSKPRADPVRNLTPSLANKPSPNNSRLLPQGSAALISGKTSALVGSGGPLSHGLVVTPSQTTGPPKSLIPAPSVDPIVEQPAAAPKPSSTELQKKTISLLXEYFHILLLHEAQQCIEELKSPDYYPEVVKEAINLALDKGTNSIDPLLRLLEHLYNKNVFKATDLETGCLLYSSLLDELAIDLPKAPVHFGEVIGRLVLSHCLSIEVVEDTLKKIEDSFFRAAVFEAMMKIMKANPSGQAILGSHVAKIDACSKLLSSE

SEQ ID NO: 10565 - protein, 366 aa, Solanum tuberosum
MAGSSVTPTPLLKDELDIVIPTIRNLDFLEMWRPFFQPYHLIIVQDGDPSKIINVPEGFDYELYNRNDINRILGPKASCISFKDSACRCFGYMVSKKKYIYTIDDDCFVAKDPSGKDINALEQHIKNLLCPSTPHFFNTLYDPYREGADFVRGYPFSMREGAATAVSHGLWLNIPDYDAPTQLVKPRERNTRYVDAVMTIPKGTLFPMCGMNLAFDRELIGPAMYFGLMGDGQPIGRYDDMWAGWCIKVICDHLGLGVKTGLPYIWHSKASNPFVNLKKEYKGIYWQEEIIPFSQSATLPKDCTSVQQCYLELSKQVKEKLSTIDPYFTKLADAMVTWIEAWDELNPTGEGLAKLPSRTAPESRLH

SEQ ID NO: 10566 - protein, 429 aa, Zea mays
  unsure (1)..(429): unsure at all Xaa locations
MIRRHKREGEARFLDRGVTGRAPRAGTLLVLAGPLARLSPTSCCLLLLWLARRRERERERDATAMDRAALTVGPGMDMPIMHDGDRYELVRDIGSGXNFGVARLMRNRXDGQLVAVKYIDRGEKIDENVQREIINHRSLRHPNIIRFKEVILTPTHLAIVMEYASGGELFERICNAGRFSEDEARFFFQQLISGVSYCHSMQVCHRDLKLENTLLDGSTAPRXKICDFGYSKSSVLHSQPKSTVGTPAYIAPEVLLKKEYDGKVADVWSCGVTLYVMLVGAYPFEDPDEPKNFRKTIQRILGVQYSVPDYVHISPECQDLISRIFVANPSTRITMPEIRSHPWFLKNLPADLVDDSATTTSKQYEEPEQPMQGMDEIMQILGEATIPAAGSRGLNQFLNDGLDLDDDMEDLDSDADLDLESSGEIVYAM

SEQ ID NO: 10567 - protein, 340 aa, Streptomyces avermitilis MA-4680
MTVTPQLPAVSREWHLASRPVGWPKPEDFALVEAEVQQPGEGQVLVRNKFVSVDPYMRGRMSAAKSYVAPFELNQPMQGGAVGEVVVSNAEGIEAGDHVLHFLGWREYAVVDAKQAVKVDPEAAPLSAYLGVLGMTGLTAYAGLLRTASFKEGDSVFVSGAAGAVGSQVGQIAKLKGASRVIGSAGSDDKVKLLVEEYGFDAAFNYKSGPVNEQLREAAPDGVDVYFDNVGGDHLEAAIGQLNRDGRIAVCGMISVYNDTEPAPGPKNLARLIQTRGRIQGFLVGDHYDLQSQFVQEVGGWIRSGELKYRETVVEGIENNLEAFLGVLRGDNTGKMIVKL

SEQ ID NO: 10568 - protein, 181 aa, Clostridium acetobutylicum
MSVYDFKAKTIEGKEVSLDTYKGKVLIIANTASKCGFTPQYEGLEKLYKEYKDKGLEILGFPSNQFAEQEPGDNNEVKNFCKLNYGVTFQLFEKTDVRDENAHPLFNYLTENAPFKGFDLNHPTGKMLSEVLEKNFPKFLEGNSVKWNFTKFLIDRDGNVVKRFEPTSEPSDMVKDIEKLL

SEQ ID NO: 10569 - protein, 379 aa, Arachis hypogaea
MGAGGRVTKIEAQKKPLSRVPHSNPPFSVGQLKKAIPPHCFERSLFISFSYVVYDLLVAYLLFYIATTYFHKLPYPFSFLAWPIYWAIQGCILTGVWVIAHECGHHAFSKYQLVDDMVGLTLHSCLLVPYFSWKISHRRHHSNTGSLDRNEVFVPKPKSKVSWYNKYMNNPPGRAISLFITLTLGWPLYLAFNVSGRPYDRFASHYDPYAPIYSNRERLLIYVSDSSVFAVTYLLYHIATLKGLGWVVCVYGVPLLIVNGFLVTITYLQHTHASLPHYDSSEWDWLRGALATVDRDYGILNKAFHHITDTHVAHHLFSTMPHYHAMEATNAIKPILGDYYQFDGTPFYKALWREAKECLYVEPDDGASKKGVYWYKNKF

SEQ ID NO: 10570 - protein, 284 aa, Zea mays
  unsure (1)..(284): unsure at all Xaa locations
LGTSRPAGDKVQGIPQNEALVFSVQENFHGRTFAAITMSTDPESRENYGPYLPGIGSVCPVTGKPIRYNNVDDVRETLEKHGKNTAAFLVEPIQGEAGIVVPDDSYLREVRALCDKHNVLLICDEIQTGIARTGKMLCHEWSGIKPDLVLLGKAISGGMYPVSCVLGSKEVMLTIEPGTHGSTYGGNPLGSAVAIRALELIEEENMIERAETLGNKFRQGLQDINNPMIKTIRGKGLLNAIVIDESRTNGHSAWDLCMLFKEKGLLAKPTHQNIIRLCPPXIIT

SEQ ID NO: 10571 - protein, 143 aa, Zea mays; identical to SEQ ID NO: 2031

SEQ ID NO: 10572 - protein, 360 aa, Ricinus communis
MQKFILLALSLALVLAITESFDFHEKELESEESLWGLYERWRSHHTVSRSLHEKQKRFNVFKHNAMHVHNANKMDKPYKLKLNKFADMTNHEFRNTYSGSKVKHHRMFRGGPRGNGTFMYEKVDTVPASVDWRKKGAVTSVKDQGQCGSCWAFSTIVAVEGINQIKTNKLVSLSEQELVDCDTDQNQGCNGGLMDYAFEFIKQRGGITTEANYPYEAYDGTCDVSKENAPAVSIDGHENVPENDENALLKAVANQPVSVAIDAGGSDFQFYSEGVFTGSCGTELDHGVAIVGYGTTIDGTKYWTVKNSWGPEWGEKGYIRMERGISDKEGLCGIAMEASYPIKKSSNNPSGIKSSPKDEL

SEQ ID NO: 10573 - protein, 261 aa, Oryza sativa
  unsure (1)..(261): unsure at all Xaa locations
MDASRVGELRTFVEACKKDPSLLADPNLAFFRDYLESLGAHLPAGLHQEPKPSSMDDIDDEYDDDDDDDLNMRDATPEPDELDQDIVESDLELEGDIVESDHQDPPQKMGDPSIDVTEENRDASQEAKSKAMEAMSEGKLEEAIDHLTKAILLNPLSAIMYGTRASVFIKMKKPVAAIRDANAALEINPDSAKGYKTRGMAYAMLGKWEEAAHDLHTASNMDYDDEINAVLKKXVEPNAHKIMEHRRKYERLRKEREEKRX

SEQ ID NO: 10574 - protein, 108 aa, Zea mays
SIGMLPSASVGESGPGVFEPIHGSAPDIAGQDKANPLATILSAAMLLRYGLGEENAARRIEAAVTETLNHGFRTGDIYSPGTTLVGCKRMGEEVLKTVESLKEVAAVN

SEQ ID NO: 10575 - protein, 466 aa, Solanum tuberosum
MAAHSSTLTISLLLMLIFSTLSSASDMSIISYDETHIHHRSDDEVSALYESWLIEHGKSYNALGEKDKRFQIFKDNLKYIDEQNSVPNQSYKLGLTKFADLTNEEYRSIYLGTKSSGDRRKLSKNKSDRYLPKVGDSLPESVDWRDKGVLVGVKDQGSCGSCWAFSAVAAMESINAIVTGNLISLSEQELVDCDKSYNEGCDGGLMDYAFEFVINNGGIDTEEDYPYKERNDVCDQYRKNAKVVKIDSYEDVPVNNEKALQKAVAHQPVSIAIEAGGRDLQHYKSGIFTGKCGTAVDHGVVAAGYGSENGMDYWIVRNSWGAKWGEKGYLRVQRNVASSSGLCGLATEPSYPVKTGANPPKPAPSPPSPVKPPTECDEYSQCPVGTTCCCVLEFRRSCFSWGCCPLEGATCCEDHSSCCPHDYPVCNVRQGTCSMSKGNPLGVKAMKRILAQPIGAFGNGGKKSSS

SEQ ID NO: 10576 - protein, 184 aa, Zea mays
MNRKPGDWDCRACQHLNFSRRDICQRCSEPRGVADRGGGGGGGDYASFGARGGSSFGGGFGAAGSDVRPGDWYCSCGAHNFASRSSCFKCSAYKEEAAVNSGAGGFDGDMSRSRGYGFGSGAAGAGAGAGAARTTNRPGWKSGDWICTRSGCNEHNFASRMECFRCNAPRDSGSAAMTYENYLH

SEQ ID NO: 10577 - protein, 245 aa, Aleurites moluccana
ALSIAGAVQSQKLAVRAISRLQSLPGGDIKLLCDTVVECVKELTGYDRVMVYKFHEDEHGEVVAESKRPDLEPYIGLHYPSTDIPQASRFLFKQSRVRMIVDCHATAVSVIQDEALMQPLCLVGSTLRAPHGCHAQYMANMGSIASLAMAVIINGNDEEAIGGRNSMRLWGLVVCHHTSARSIPFPLRYACEFLMQAFGLQLNMDLQLASQFSEKHVLRTQTLLCDMLLRDSPTGIVTQSPSIMD

SEQ ID NO: 10578 - protein, 343 aa, Bacillus cereus ATCC 14579
MTLENTKNLKKQVAPFEKSTIKKSVWQLINTIVPFIILWYLAYKSLSVSYWLTLVPALLAAGFMTRIFIIFHDCTHYSFFKSRRANRIVGTCMGVLTLFPFDQWGHEHSIHHATSGNLDKRGTGDIWTLTVDEYVAAPFRLRLAYRLYRNPFVMFGLGPIYVFLLKNRFNRKGARQKERMNTYLTNIIIVAVVAILCWAIGWQSFLLVHGTIFLIAGSVGIWLFYVQHTFEDSYFEEDKDWEYVKAAVEGSSFYKLPKILQFLTGNIGFHHVHHLSPRVPNYKLEEAHNNTLPLKNVPTITLATSLQSLRFRLWDEKSNNFVSFKDVKNIIKNNVSVRVKSEL

SEQ ID NO: 10579 - protein, 168 aa, Oryza sativa (japonica cultivar-group)
MKNMVFEKKKEKKEKEKCQQSCRSCSHFTCLVAQIAVSTISSLLFSTEIGLGLSGFGVLFSFLGIIMLFDKGFLAIGNILFVSGVSLTIGPKSTVQFFTKPKNHKGSIAFGIGFFLVLIGWPFFGMLAEAYGFVKLFRGFWPTAAVYLQKSPTFGWIFHHPLVTSVRL

SEQ ID NO: 10580 - protein, 241 aa, Rickettsia prowazekii
MIDLTGKTSLITGASSGIGSAIARLLHKLGSKVIISGSNEEKLKSLGNALKDNYTIEVCNLANKEECSNLISKTSNLDILVCNAGITSDTLAIRMKDQDFDKVIDINLKANFILNREAIKKMIQKRYGRIINISSIVGIAGNPGQANYCASKAGLIGMTKSLSYEVATRGITVNAVAPGFIKSDMTDKLNEKQREAIVQKIPLGTYGIPEDVAYAVAFLASNNASYITGQTLHVNGGMLMV

SEQ ID NO: 10581 - protein, 259 aa, Bacteroides fragilis
MNRFENKIIIITGAAGGIGASTTRRIVSEGGKVVIADYSREKADQFAAELSNSGADVRPVYFSATELKSCKELITFTMKEYGQIDVLVNNVGGTNPRRDTNIETLDMDYFDEAFHLNLSCTMYLSQLVIPIMSTQGGGNIVNVASISGITADSNGTLYGASKAGVINLTKYIATQTGKKNIRCNAVAPGLILTPAALNNLNEEVRKIFLGQCATPYLGEPQDVAATIAFLASEDARYITGQTIVVDGGLTIHNPTINLV

SEQ ID NO: 10582 - protein, 150 aa, Capsella rubella
IHFTTLVDGLSRAGKLEACQYFMDEMVKVGCTPDVVCYTVMITGYISGGELEKAEEMFKEMTEKGQLPNVFTYNSLIRGFCMAGKFKEACSLLKEMESRGCNPNFVVYSTLVNNLRNAGKLLEAHEVVKDMVEKGHYAHLLSKLKKYRRS

SEQ ID NO: 10583 - protein, 366 aa, Saccharomyces cerevisiae
MFSRLPTSLARNVARRAPTSFVRPSAAAAALRFSSTKTMTVREALNSAMAEELDRDDDVFLIGEEVAQYNGAYKVSKGLLDRFGERRVVDTPITEYGFTGLAVGAALKGLKPIVEFMSFNFSMQAIDHVVNSAAKTHYMSGGTQKCQMVFRGPNGAAVGLGAQHSQDFSPWYGSIPGLKVLVPYSAEDARGLLKAAIRDPNPVVFLENELLYGESFEISEEALSPEFTLPYKAKIEREGTDISIVTYTRNVQFSLEAAEILQKKYGVSAEVINLRSIRPLDTEAIIKTVKKTNHLITVESTFPSFGVGAEIVAQVMESEAFDYLDAPIQRVTGADVPTPYAKELEDFAFPDTPTIVKAVKEVLSIE

SEQ ID NO: 10584 - protein, 394 aa, Capsicum annuum
MPPKAAKGKEVPAERPILGRFSSHLKIGIVGLPNVGKSTLFNTLTKLSIPAENFPFCTIEPNEARVHVPDERFEWLCQLYKPKSEVAAFLEIHDIAGLVRGAHAGQGLGNSFLSHIRAVDGIFHVLRAFEDPDIIHVDDTVDPVRDLEVISEELRLKDIEFIERRIEDLEKSMKRSNDKQLKIEHELCLRVKASLEEGKDVRLGDWKAADIELLNTFQLLTAKPVVYLVNMNEKDYQRKKNKFLPKIHAWVQEHGGDIIIPFSAAVERNLADMPPDEASKYCEENKLQSCLPKIIKTGFSAINLIYFFTAGPDEVKCWQIRRLMKAPQAAGTIHTDFERGFICAEVMKFDDLKELGSEAAVKAAGKYKQEGKTYVVQDGDIIFFKFNVSGGGKK

SEQ ID NO: 10585 - protein, 214 aa, Paeonia szechuanica
IVESVGEGVTDVKPGDHVLPIFTGECKECRHCKSEESNMCDLLRINTDRGVMLNDGKSRFSINGQPIFHFVGTSTFSEYTVLHVGCLAKINPEAPLDKVCVLSCGISTGLGATLNVAKPKKGSTVAIFGLGAVGLAAAEGARIAGASRIIGVDLNPKRFDEARKFGVTEFVNPKDYNKPVQEVIAEMTGGGVDRSVECAGSIMAMMSAFECVHD

SEQ ID NO: 10586 - protein, 245 aa, Lolium temulentum
MGRGKVQLKRIENKINRQVTFSKRRSGLLKKAHEISVLCDAEVGLIIFSTKGKLYEFATDSCMDKILERYERYSYAEKVLISTESEIQGNWCHEYRKLKAKVETIQRCQKHLMGEDLESLNLKELQQLEQQLESSLKHIRSRKSQLMHESISELQKKERSLQEENKILQKELIEKQKAHTQQAQLEQTQPQTSSSSSSFMMGEATPATNRSNPPAAASDRAEDATGQPPARTVLPPWMVSHLNNG

SEQ ID NO: 10587 - protein, 305 aa, Miscanthus sinensis var. sinensis
IESVGEGVTDVAPGDHVLRVFTGECKECPHCKSAESNMCDLLRINTDRGVMIGDGKSRFSINGKPIYHFVGTSTFSEYTVMHVGCVAKINPQAPLDKVCVLSCGISTGLGASINVAKPPKGSTVAIFGLGAVGLAAAEGARIAGASRIIGVDLNPSRFEEARKFGCTEFVNPKDHKKPVQEVLAEMTNGGVDRSVECTGNINATIQAFECVHDGWGVAVLVGVPHKDAEFKTHPMNFLNERTLKGTFFGNFKPRTDLPNVVELYMKKELEVEKFITHSIPFAEINKAFDLMAKGEGIRCIIRMEN

SEQ ID NO: 10588 - protein, 379 aa, Arabis gemmifera
MSTTGQIIRCKAAVAWEAGKPLVMEEVEVAPPQKHEVRIKILFTSLCHTDVYFWEAKGQTPLFPRIFGHEAGGIVESVGEGVTDLQPGDHVLPIFTGECGDCPHCHSEESNMCDLLRINTERGGMIHDGESRFSINGKPIHHFLGTSTFSEYTVVHSGQVAKINPDAPLDKVCIVSCGLSTGLGATLNVAKPKKGQSVAIFGLGAVGLAAAEGARIAGASRIIGVDLNSQRFDQAKEFGVTEFVNPRDHDKPVQQVIAEMTNGGVDRSVECTGSVQAMIQAFECVHDGWGVAVLVGVPSKDDAFKTHPMNFLNERTLKGTFFGNYKPKTDIPGVVEKYMNKELELEKFITHTVPFSEINKAFDYMLKGESIRCIITMGA

SEQ ID NO: 10589 - protein, 353 aa, Lupinus luteus
MSVLSDLINLNLSDTTEKIIAEYIWVGGSGVDLRSKARTLSGPVNDPSKLPKWNYDGSSTGQAPGKDSEVILWPQAIFKDPFRRGNNILVMCDTYTPAGEPIPTNKRHAAAKIFSHPDVVAEEPWFGIEQEYTLLQKDIHWPIGWPLGGFPGPQGPYYCGTGAEKAFGRDIVDSHYKACLYAGINISGINAEVMPGQWEFQVGPSVGISAGDELWVARYILERITEIAGVVLSLDPKPIPGDWNGAGAHTNYSTKSMRNDGGYEVIKKAIEKLGKRHNEHIAAYGEGNERRLTGRHETADISTFFWGVANRGASIRVGRDTEKEGKGYFEDRRPASNMDPYVVTSMIAETTLL

SEQ ID NO: 10590 - protein, 248 aa, Azoarcus evansii
MQLKDKVAVVTGAGQGIGAAVARAYAREGAKVAVIDIDQATADRMAGQIVEAGGQAIGVACNVADRDHVEAMAAKVNAEWGRIDILVNNAGITRTAMLNKMTPEQWNQVLAVHLTGAFNCLQAVVGGMIERQYGRIIYVTSTAGVLGTIGQINYSAAKAGVLGMTKSTAKELARYGITANAIAPGAATPMTETIRTDERFKEKYLDRIPLGRWAEPEEITPVFVFFASDASSYVTGQILAADGGMTIH

SEQ ID NO: 10591 - protein, 751 aa, Geobacillus stearothermophilus
MENQNRQNAAQCPFHGSVTNQSSNRTTNKDWWPNQLNLSILHQHDRKTNPHDEEFNYAEEFQKLDYWALKEDLRKLMTESQDWWPADYGHYGPLFIRMAWHSAGTYRTGDGRGGASTGTQRFAPLNSWPNNANLDKARRLLWPIKKKYGNKISWADLFILAGNVAIESMGGKTIGFGGGRVDVWHPEEDVYWGSEKEWLASERYSGDRELENPLAAVQMGLTYVNPEGPDGKPDPKAAARDIRETFRRMGMNDEETVALIAGGHTFGKAHGAGPATHVGPEPEAAPIEAQGLGWISSYGKGKGSDTITSGIEGAWTPTPTQWDTSYFDMLFGYDWWLTKSPAGAWQWMAVDPDEKDLAPDAEDPSKKVPTMMMTTDLALRFDPEYEKIARRFHQNPEEFAEAFARAWFKLTHRDMGPKTRYLGPEVPKEDFIWQDPIPEVDYELTEAEIEEIKAKILNSGLTVSELVKTAWASASTFRNSDKRGGANGARIRLAPQKDWEVNEPERLAKVLSVYEDIQRELPKKVSIADLIVLGGSAAVEKAARDAGFDVKVPFFPGRGDATQEQTDVESFAVLEPFADGFRNYQKQEYSVPPEELLVDKAQLLGLTAPEMTVLVGGLRVLGANYRDLPHGVFTDRIGVLTNDFFVNLLDMNYEWVPTDSGIYEIRDRKTGEVRWTATRVDLIFGSNSILRSYAEFYAQDDNQEKFVRDFINAWVKVMNADRFDLVKKARESVTALQSVHSNRSDTARNLQ

SEQ ID NO: 10592 - protein, 495 aa, Oryza sativa; identical to SEQ ID NO: 9266

SEQ ID NO: 10593 - protein, 382 aa, Phanerochaete sordida
MAFASLLAIFALVAVASARPRPNPGAVCSDGTRVSNGACCAFIPLMQDLQQNVFQNECGEDAHEVIRLTFHDAIAISRSQGPKAGGGADGSMLLFPTVEPNFAANNGIDDSVNNLIPFMQKHNTISAGDLVQFAGAVALTNCPGAPRLEFLAGRPNKTIAAVDGLIPEPQDDVTKILKRFDDAGGFTPFEVVSLLASHSVARADKVDSTIDAAPFDSTPFTFDTQVFLEVLLKGTGFPGLSNNTGEVASPLPVGTGSDTGEMRLQSDFALARDERTACFWQSFVNEQEFMSASFKAAMSKLAVLGHNRNTLTDCSEIIPEPLPAVKKPATFPATTSAKDLQLTCRALRFPTLTTDQGAQQTLIAHCPNGSMNCTSVQFNGPA

SEQ ID NO: 10594 - protein, 330 aa, Oryza sativa (japonica cultivar-group)
MMRDVCMEVLPPMDHYASRGNWFMARKWSPEENKQFERALAGLDLRCPDWDRVARAIPGRSALEVMNHFRDLELDVQQIENGMVPFPVYGAAAAGGAFTLQWDGAHGVGDFRNAYRFGGGGGGKRHFGRTPEQERKKGVPWTEEEHKLFLLGLKKYGKGDWRNISRNFVQTRTPTQVASHAQKYFIRLNSGGKDKRRSSIHDITTVNLTDDRPPSPSQSSLISNQSNTSTLTAAVAPFSSTADVKPQNAANASFNSPSRTLGMAGYGMGLQDQGLQCGGQKQSGHSLSDDGRHCCIEPSGLMWLLLLEILQAYTTGFSMSPDVPLQHQTI

SEQ ID NO: 10595 - protein, 260 aa, Glycine max
MGLVFGKISVESIKCKSLYIRSIPHHHPNHSLLSPKSQHTHFRSLSLMGLVFGKITVETAKYEVIKSTSEYEIRKYAPSVVAEVTYDPSQFKGNKDGGFMILANYIGAVGKPQNTKPEKIAMTAPVITKDSVGGGGSDGEKIAMTAPVVTKEGGGEGEEGKRNKMVTMQFVLPAVYGKAEEAPKPTDERVVIREEGLRKYGVVKFGGVASEQVVRERVEKLRESLEKDGFKVVGDFLLGRYNPPWTIPAFRTNEVMIPVE

SEQ ID NO: 10596 - protein, 121 aa, Buchnera aphidicola
LLCSNLFGDIVSDECAIITGSIGMLPSASLNEKKFGLYEPAGGSAPDIEGKNIANPIAQILSVSMLVRYGMNLKKIADKIDQSVISVLKKGYRTADISNNNNYLKTNEMGDVIANTLISGE

SEQ ID NO: 10597 - protein, 287 aa, Staphylococcus epidermidis ATCC 12228
MAIQWYPGHMAKAKRQVSEQLKKVDVVFELVDARIPYSSRNPMIDDVIKQKPRVVILNKKDMTNLKELEKWEIYFKNEGFYPVAVDAKHGKNLKNVEVEAIKATQEKFDREKAKGLKPRAIRAMIVGIPNVGKSTLINKLAKRSIAETGNKPGVTKQQQWIKVGKSLQLLDTPGILWPKFEDEEVGKKLSLTGAIKDSIVHLDEVAIYGLNFMIKHDVSALKRHYNIDTHEDAEILDWFDAIGRRRGLLQKGNEVDYESVIELIINDMRNAKIGTYCFDILKEMKSE

SEQ ID NO: 10598 - protein, 388 aa, Oryza sativa
  unsure (1)..(388): unsure at all Xaa locations
MADKENSTPASAARLTRSSAAAGAQAKRSAAAGVADGGAPPAKRKRVALSDLPTLSNAVVVAPRQPHHPVVIKPSSKQPEPAXRRRRRPAAAAAAPPCHSAFDVDGXRPSSGWDPQYASDIYTYLRSMEVEARRQSAADYIEAVQVDVTANMRAILVDWLVEVADEYKLVADTLYLAVSYLDRYLSAHPLRRNRLQLLGVGAMLIAAKYEEISPPHVEDFCYITDNTYTRQEVVKMESDILKLLEFEMGNPTIKTFLRRFTRSCQEDKKRSSLLLEFMGSYLAELSLLDYGCLRFLPSVVAASVVFVAKLNIDPYTNPWSKKMQKLTGYKVSELKDCILAIHDLQLRKKCSNLTAIRDKYKQHKFKCVSTLLPPVDIPASYLQDLTEX

SEQ ID NO: 10599 - protein, 499 aa, Zea mays
MHLQAGGAAHLHLQYFMPQHQPQEPATDLEAQESSAVCRRSSSTSPPAPTTMWEYHQAAHAAALQTTSSPASSFPSWSPYAGTTAALLGASSAFISTDAAGADSSSPGMRLLPAGEHGGGHAYGEQSNIACYKENFLDLLASKNVTQEMFDDVPAGHYTAQALLSGRFAAGSDVAPPVKYEVTGGSPLFFGSAAAAAGGMHQQGMDMAGCTTPRYTYGADHHQMKEGGDQQQELASPAMASFLQQLSSNAGGGGGVGMHAASMDYSGTGGGLDRICHESRALEAGPFGMRSLPDLSSFGGYSRSTTAESTSSAQPYLHASGSLAESSRQQEPDIVSARSSSSGSGAASERKKRASEERTSTVKKSKQEGSKPSPPKQQQVPKVKIGEKITALQQIVSPFGKTDTASVLFETIKYIKFLHEQVQLLSEPYTNSSRSKGNNHFPWGDHRAAAETSKQGDEAEHDLSDRGLCLVPVSWTPQVYRDGTAMDYWTPAYRGCLYR

SEQ ID NO: 10600 - protein, 540 aa, Calycadenia multiglandulosa
ERKKEAKASTSSSSSMAPAAKAKDLQNPPDSGGMDELLEVLGYKVKSTDMDDVAQKLEQLEMVMGEDGILQLSDTVHYNPSDLSGWVQSMLSELNNSGGDSDIGIGIPAGGESSTTMIDFSNNKEKQPEDPYDLRAIAGGAIYGEGSESSGNGIKRMKMKSTAEGSGAVDVPPESPPRPVVLVDSQEAGIRLVHTLMACAEAVQNNDMKLAEALVKHVGILVASQAGAMAKVATYFAGALAQRIYKIYPQDGGLETSCWEILQMHFYESCPYLKFAHFTANQAILEAFAGAARVHVIDFSLNQGMQWPALMQALALRPGGPPAFRLTGIGPPQPDNTDALQQVGWKLAQLADTIGVEFEFRGFVAASIADIDAAMLDIRLDEVVAVNSVFELHRLLARPGAVEKVLSSITSMKPKIVTLVEQESNHNGVVFMDRFNEALHYYSTMFDSLESSALTQPNSQQDLVMSEVYLGRQICNVVACEGPDRVERHETLTQWRTRMISAGFEPVHLGSNAFKQASMLLALFAGGDGYRVEENDGCLM

SEQ ID NO: 10601 - protein, 366 aa, Chlamydia trachomatis
MKMGQTECGIVGLPNVGKSGLFNALTGAQVASCNYPFCTIDPNVGIVPVIDPRLETLARISQSQKIIYADMKFVDIAGLVKGAASGAGLGNRFLSHIRETHAIAHVVRCFDNDDITHVSGKIDPEEDIAVINLELVLADFSSATSVREKLGKQAKGKKDIGQLLPLLDRVVDHLESGNPVRTLSLSLEEKVLLKPYPFLTGKPMLYIANIDEDSLTDLDNPYVQKVREIAKREEANVVPICVKLEEEILSLPLEERQDFLHSLGLQESGLNRLVASAYHTLGLISYFTTGPQETRAWTISKGATAAEAAGEIHSDIQRGFIRAEVVTMEDIVAYDGRAGAREAGKLRAEGRDYIVQDGDIMLFLHN

SEQ ID NO: 10602 - protein, 242 aa, Mangifera indica
RLQLQKKGVGGDGLVLPKYKGLLGTVGTIAREEGLAALWKGIVPGLHRQCLFGGLRIGLYEPVKTFYVGSDFVGDVPLSKKILAAFTTGAIGITIANPTDLVKVRLQAEGKLPPGVPRRYSGALNAYSTIVRQEGLGALWTGLGPNVARNAIINAAELASYDQVKQTILKIPGFTDNVVTHLLSGLGAGFFAVCIGSPVDVVKSRMMGDSAYKSTLDCFIKTLKNDGPLAFYKGFIPNFGRL

SEQ ID NO: 10603 - protein, 236 aa, Juglans nigra
QQVDGENPNLYFRSEDVILCVLPLFHIYSLNSVFLCGLRAGAAILLMQKFEIVSLLQLIQKYKVSIMPVVPPIVLAISKSPDLDKYDLSSIKMLKSGGAPLGKEIEETVKAKFPNAKFGQGYGMTEAGPVLSMCLAFAKEPFEVKSGACGTVVRNAEMKIIDPETGSSLPRNQPGEICIRGDQIMKGYINDPEATDRTIDREGWLHTGDVGFIDDDDELFIVDRLKELIKYKGFQV

SEQ ID NO: 10604 - protein, 418 aa, Brassica rapa
GSVVLILFCPAFSINTLSSTESLRISSNRTLVSPGNNFELGFFRTNSSSRWYLGIWYKKLLDRTYVWVANRDNPLSNAIGTLKISGNNLVLLGHTNKSVWSTNLTRGNERLPVVADVLSNGNFVMRDSSNNDASEYLWQSFDYPTDTLLPEMKLGYDLKTGLNRFLTSWRSSDDPSSGDFSYKLETRSLPEFYLWHGIFPMHRSGPWNGVRFSGIPEDQKLSYMVYNFTENSEEVAYTFRMTNNSIYSRLTLSSEGYFQRLTWNPSIGIWTAFWSSPVDPQCDTYIMCGPYAYCGVNTSPVCNCIQGFNPRNIQQWDQRVWAGGCIRRTRLSCSGDGFTRMKNMKLPETTMAIVDRSIGVKECEKRCLSDCNCTAFANADIRNGGTGCVIWTGRLDDMRNYVAHGQDLYVRLAVADLV

SEQ ID NO: 10605 - protein, 169 aa, Leavenworthia stylosa
NTDRVGMIHDGESRFSIKGKPINHFLGTSTFSEYTVVHSGQVAKINPEAPLDKVCIVSCGLSTGLGATLNVAKPKKGQSVAVFGLGAVGLGAAEGARIAGASRIIGVDLNSNRFEQAKKFGVTEFVNPKEHDKPVQQVIAEMTNGGVDRSVECTGSVQAMIQAFECVHD

SEQ ID NO: 10606 - protein, 419 aa, Zea mays
MSHYHSADFEEMEDEYDMNEPVDDMEGEDEYQELVIRDSDAEDEDDADQLHKLSDTSAADARSGKDIQGIPWETIEVTRETYRQARLEQYKNYENIPNSGVAAMMLRNLVWATSKHDVYLVLHYSVLHWSALNGVDTEIMDVHGHVAPSEKHPGSLLEGFLHTQISTMAVKDNLLVAGGFQGELICKHLDREGISFCCRTTYDDNAITNALEIFNTSSGALHFIASNNDCGVREYDMERYQLFKHFRFDWPVNHTSLSPDGKLVIIVGDDTDALLIDSNSGKTIHSMKGHLDFSFASAWSPDGLTFATGNQDKTCRIWDARNLTESVHVLRGNVGAIRSIRFTSDGHFLSMAEAADFVHIFDIKSDYNKRQELDFFGEVSGMSFSPDTDTLYVGISDRTYGSLLQFGRLYNYSYLDSLL

SEQ ID NO: 10607 - protein, 246 aa, Glycine max
MGKSYPTVSADYQKAVEKAKKKLRGFIAEKRCAPLMLRLAWHSAGTYDVSSKTGGPFGTIKHPSELAHGANNILDIAVRLLEPLKAEFPILSYADFYQLAGVVAVEVTGGPEVPFHPGREDKPEPPPEGRLPDATKGSDHLRDVFGKAMGLSDRDIVALSGGHTIGAAHKERSGFEGPWTSNPLIFDNSYFKELLSGEKEGLLQLPSDKALLSDPVFRPLVEKYASDEDAFFADYAEAHQKLSELG

SEQ ID NO: 10608 - protein, 333 aa, Glycine max; identical to SEQ ID NO: 4388

SEQ ID NO: 10609 - protein, 342 aa, Oryza sativa
  unsure (1)..(342): unsure at all Xaa locations
MTSSMSKSDKKKVLDFAAWSFNITTSVGIIMVNKALMATHGFSFATTLTGLHFVTTTLMTIVFRWLGXLSQPSHLPIPDLIKFVIFSNLSIVGMNVSLMWNSVGFYQIAKLCMIPASCLLEVVFDRVHYSRDTKLSIMVVLIGGAGCTVTDVSVNAKGLAAAVIAVWSTALQQYYVHLLQRKYSLNSFNLLGHTAPAQAGSLLLVGPFVDFLLTGKRVDHFGFTSIALLTMVFIVPQFFLTLSCVIAIGVNLSQFICIGRFSAVSFQVLGHMKTVLVLSLGFLFFGKEGLNFQVVLGMILAVVGMIWYGNASAKPGGKERRSVLPVRSEKPNGALDEKDGSE

SEQ ID NO: 10610 - protein, 392 aa, Barnebya dispar
DLEPVNPADVPVTAAGALKSYKFAAKAISRLQSLPSGNIFLLCDVLVKEVRDLTGYDRVMVYKFHEDEHGEVVSECRRSDLESYLGLHYPATDIPQASRFLFMKNKLRMICDCLAPPVKVIQDENLPQPLSLCGSTLRSPHGCHAQYMTNMGTIASLVMSVTINEDDDMKDCEQPQMPRKLWGLVVCHHTSPRFIPFPLRYACEFLIQVFGVQINKEVELAAQVREKHILRIQTLLCDMLLRDAPVAIITQSPNVMDLVRCDGAALYYKNKFWLLGVTPTEAQIRDIAEWLLECHSGNTGLSTDSLMEAGYPGASVLGDAVCGMAAISITSRDFLFWFRSHTAKEIKWGGAKHDPDDKDDGRKMHPRSSFKAFLEVVKWRSLPWEDVEMDAI

SEQ ID NO: 10611 - protein, 324 aa, Zea mays
MSASAAPTPAAGGRFFTGFTRLCKGLAVVLLLAHILVHLFPSAATYLTLIPARTIPFAWNLVTAGYIEQTIPGVIVSIVGLLLFGKVLEPLWGAKELLKFIFIVNLSISACVFVTMIVLYYITQEESYLYTPVSGFYGVLSGLLVGIKQILPDQELNLFVFKISAKWIPSIVAFISVAVSFFIKEVMSYLPIILFGIYMSWIYLRYFQRRLEVGLKGDPSDEFSFSSFFPGFLRPILDPIASVFHKLFCGRPARPEGTGQTLDGSQFPGSGSTEANRRRERGQKALEQRLAEKLAAVRKAEGTPPPKQQQEEEEDAENDASDKV

SEQ ID NO: 10612 - protein, 494 aa, Staphylococcus aureus subsp. aureus MW2
MEKKNKQIDRGDLKQNLSEKFVWAIAYGSCIGWGAFILPGDWIKQSGPIAASIGIVIGTLLMILIAVSYGALVERFPVSGGAFAFSFLSFGRYVSFFSSWFLTFGYVCVVALNATAFSLLVKFLLPDVLNNGKLYTIAGWDVYITEIIIATVLLLVFMLVTIRGASVSGSLQYYFCVAMVIVVLLMFFGSFFGNNFALENLQPLAEPSKGWLVSIVVIVSVAPWAYVGFDNIPQTAEEFNFAPNKTFKLIVYSLLAASLTYVVMILYTGWLSTSHQSLNGQLWLTGAVTQTAFGYIGLGVLAIAIMMGIFTGLNGFLMSSSRLLFSMGRSGIMPTMFSKLHSKYKTPYVAIIFLVGVSLIAPWLGRTALTWIVDMSSTGVSIAYFITCLSAAKLFSYNKQSNTYAPVYKTFAIIGSFVSFIFLALLLVPGSPAALTAPSYIALLGWLIIGLIFFVIRYPKLKNMDNDELSRLILNRSENEVDDMIEEPEKEKTK

SEQ ID NO: 10613 - protein, 247 aa, Haloarcula marismortui
MFNAIVSADTLQATLDSVSVLVDECKIHLEEDGLEIRAVDPANVGMVDLRLDAAAFESYETDGGLIGVNLSRLEDIAGMADAGQLVHLDLDEETRKLHISIDGLEYTLALIDPDSIRQEPDLPDLDLSANIVIEGKDIDRSVTAADMVSDHIALGVDATDELFYVDAEGDTDDVHLELTRDDLIDLTPGDAHSLFSLDYLKNMNKAIPKDAEVEMELGEEFPVKMHFSFAEGQGRVTYMLAPRIQSE

SEQ ID NO: 10614 - protein, 210 aa, Enterolobium cyclocarpum
YDRVMAYKFHEDDHGEVIAEITKPGLEPYLGLHYPATDIPQAARFLFMKNKVRMIVDCHARHVKVLQDEKLPFELTLCGSTLRAPHTCHLQYMENMNSIASLVMAVVVNDNDEDVDSSDSIQPQKRKRLWGLVVCHNTTPRFVPFPLRYACEFLAQVFAIHVNKELELENQIVEKKILRTQTLLCDMLMRDAPLGIISQSPNIMDLVKCD

SEQ ID NO: 10615 - protein, 358 aa, Arabidopsis thaliana
MTATNKQVVLKNYVSGFPKESDFDFKTTTVEFKLPGGSNSVLVKNLYLSCDPYMRIRMGKPDPSTAALAQAYAPGKPIFGYGVSRVIESGHPDYKKGDLLWGIVGWEEYSVITPMTHMHFKIQHTDIPLSYYTGLLGMPGMTAYAGFYEVCSPKEGETVYVSAASGAVGQLVGQFAKMMGCYVVGSAGSTEKVDLLKTKFGFDDAFNYKEEPDLSAALKRFSELLISKRLMSLTVRIGIDIYFENVGGKMLDAVLLNMNPHGRIAVCGMISQYNLENQEGVHNLSNIIYKRIRIQGFAVFDFYEKYSKFLDFVLPHIKEGKITYVEDVADGLEKGPEALVGLFHGKNVGKQVVVIARE

SEQ ID NO: 10616 - protein, 267 aa, Helianthus annuus
MENSEAIEHEHDFSCIDRSMSFQNEDSGDISPQRRIGKGKIEIKRIENTTNRQVTFCKRRNGLLKKAYELSVLCDAEVALIVFSSRGRLYEYANNSVRGTIDRYKKSCLDPPSTGSVAEANAQFYQQEATKLRQQIANLQNQNRQFYRNIMGESLADMPGKELKNLESKLEKAINRIRAKKNELLFAEIEYMQKRELELHNSNQFLRARISENERAQQQHMSLMPGSSGYNDLGPHQSFDGLNDLQTNELQLNNNYSCQDQTPLQLV

SEQ ID NO: 10617 - protein, 511 aa, Torenia hybrida
MTVATTLVVVLSRELLLYVLVVYILVSKSLSTIIVVSRKRLPPGPTGFPVVGALPLLGSMPHVALAKMAKKYGPVMYLKTGTLGMVVASTPSSARAFLKTLDSNFSNRPANAGATHLAYGAQDMVFAPYGPRWRLLRRLSNLHMLGGKALDGWANVRASELGHMLEAMNRASREGEVVVVPEMLVYAMANMIGQVILSRRVFVTKGEEVNEFKDMVVELMTSAGYFNIGDFVPILAWMDLQGIERGMKALHKKFDKLITRMLEQHEASAHKPDFLDAIIAASLDDYSSEEERLSTSNIKALLLNLFTAGTDTSSSTIEWALSEMLKKGKILKRAQEEMDRVVGRERRLVESDIEKLGYLKAICKETFRKHPSTPLNLPRISSEACVVNGHYIPKGTRLSVNIWAIGRDPEVWEDPLEFNPDRFLHSKMDPRGNDFELMPFGAGRRICAGTRMGIVLVEYILATLVHSFDWKAADQDNNIMNMEEAFGIALQKATPLKALVTPRLPLHCYLP

SEQ ID NO: 10618 - protein, 413 aa, Glycine max
  unsure (1)..(413): unsure at all Xaa locations
SRSSFGADQFDDADEAEKEHKSSFFNWFYLSINXGALIAASVLVWVQTNVSWGWGFGIPAVAMAIAVVSFFSGTRLYRNQKPGGSPLTRMCQVIVASIRKSDVQVPNDKSGLYEIEEDSESAIEGSRKLDHTNGLRFLDKAAVLGDSDNVKDPVNPWRLCTVTQVEELKAIIRLLPIWATGIIFSTVYSQMGSYFILQGDTMNNRVGNIKLHISPATLSVFDTISVIFWVPVYDRIIVPVARKFTGRKNGITQLPRVGIGLFLSIFAMVYSVILESMRLKMVRRHNYYDREQVPMSLYLQIPPYFIIGCAEVFTFIGQLEFFYEQAPDAMRSTCSALQLLTVSFGSYLSSLLITIVTKVTTRNGGPGWLPDKLNYGHLDYFFLLLTVLSVLNFVAFLQVSKLYSYKNPVGTLH

SEQ ID NO: 10619 - protein, 250 aa, Spinacia oleracea
MGKSYPTVSENYQKSIEKARRKLRGLIAEKQCAPLMLRLAWHSAGTFDCTSKTGGPFGTMKHQAELAHGANNGLVIAVRLLEPIKEQFPEITYADFYQLAEFVAVEVTGGPEVPFHPGREDKPEPPQEGRLPDATKGCDHLRDVFIKQMGLTDQDIVALSGGHTLGRCHKDRSGFEGAWTTNPLVFDNTYFKELLSGEKEGLLQLPSDKALLSDPVFRPLVEKYAADEDAFFADYAEAHLKLSELGFADA

SEQ ID NO: 10620 - protein, 293 aa, Rhizobium sp. CIAM490
GKTQIKEFDTFPTLEQLPLWGFDGSSTMQAEGRSSDCVLKPVALYPDPARTNGALVMCEVMMPDGVTPHASNARATILDDEDAWFGFEQEYFFYQNGRPLGFPEQGYPAPQGPYYTGVGYSNVGDVAREIVEEHLDLCLAAGINHEGINAEVAKGQWEFQIFGKGSKKAADQIWMARYLLQRLTEKYGIDIEYHCKPLGDTDWNGWGMHCNFSTKYMREVGGKDYFEALMAAFDKNMMDHIAVYGPDNDKRLTGKHETAPWNKFSYGVADRGASIRVPHSFIQNDYKGYVEDR

SEQ ID NO: 10621 - protein, 238 aa, Glycine max
FIKCFVGSEEGTPDSVNPSVVDDDEEEGLPSPPLDEGAFFVTQAGSMELSQFFDGMDDDGNPRPTGPFSKNHENGRKPAFDSHVLEMRKLQPSHDTVVINRDVKSQQQAKENKAAVMPVRPNKPVTADSGPGRPPKSNVQRKSNMEPKMQQKMENNSITRRPPTAQLDKSKRSDDDAVQVKLEATKRKLQESYQQAEKAKRQRTIQVMEINDLPKQGLHRNTHFKPGYHSRHWANGRR

SEQ ID NO: 10622 - protein, 345 aa, Austrobaileya scandens
TGYDRVMAYRFHEDDHGEVVSEIRKSELEPYLGLHYPATDIPQAARFLFMKNKVRMICDCHAKSVTVHQDEKLQFDLTLCGSTLRAPHSCHLQYMANMGSIASLVMAVVVNEGEQDEEETAEPNQQPQLKRKRLWGLVVCHNTTPRFVPFPLRYACEFLIQVFAIHVNKEMELQNQLQEKNILRMQTLLCDMLLRDAPLGIVTQSPNIMDLVKCDGAAVLYGNKVWLLGVTPTESQIQDIASWLSESHMDSTGLSTDSLFEAGYPGALALGAKVCGMAAVKITLKDMLFWFRSHTAAEVRWGGAKHDPVDRDDGRRMHPRSSFKAFLEVVKSRSLPWKEYEMDGI

SEQ ID NO: 10623 - protein, 507 aa, Candida albicans
MRSYKSSITDENELTKQRLRAKSIANLSSNHATAGQTSTSSQHREALTDLTSQENKNHPRVKLTQTNTNHHRNSSSSSNKIQIYQQIEQKKTDIHQFKKPRLEKVLLNDDDDETDDEFDDEEDKENRYHDLELNDDDSKHQLISEAFETIDDRGISEGENDTAQEARERLEEETQSHTQDMRSIYGVHVPMQPMWNNAIINELKYVIQKYSRNTLDENDEDTYDTTMVAEYSPEIFNYLHELENKFTPDPNYMDFQDDLKWEMRAVLIDWVVQVHARFNLFSETLYLTVNYIDRFLSKRRVSLSRFQLVGAVALFIAAKYEEINCPTVQEIAYMADNAYSIDEFLKAERFMIDVLEFDLGWPGPMSFLRRISKADDYDYETRTLAKYFLEITIMDSKFVASPPSWLAAGAHYISRILLGRGEWTELHVFYSGYTEKQLQPLADVLLENCRHAEINHKAIFEKYKERRYRKSSLFVQEYFRHIMSRVDLKTSFQQCGTLHFIQSSQNH

SEQ ID NO: 10624 - protein, 148 aa, Pleurotus cornucopiae
ADQLSEEQISEFKEAFSLFDKDGDGTITTKELGTVMRSLGQNPTEAELQDMINEVDADGNGTIDFPEFLTMMARKMRDTDSEEEIKEAFKVFDKDGNGYISAAELRHVMTNLGEKLTDNEVDEMIREADIDGDGQINYEEFVKMMLSK

SEQ ID NO: 10625 - protein, 232 aa, Brassica rapa
MRGVLFSVLLLFPAFSFSANTLSATESLTISSNKTISSPGNIFELGFFKPSSSSRWYLGIWYKAISKRTYVWVANRDHPLSTSTGTLKISDSNLVVVDGSDTAVWSTNLTGGGDVRSPVVAELLDNGNLVLRDSNNNDPDGVLWQSFDFPTDTLLPDMKLGWDLKTGFNRFLRSWKSPDDPSSGDYSFKLETRGFPEAFLWNKASQVYRSGPWNGIRFSGVPEMQPFDYIEF

SEQ ID NO: 10626 - protein, 211 aa, Zea mays
MAAVAAATSHLLRHHRNPHLLLLRAAISSSRALPQQPELSPDPTAGTPDLAGAAPLPPNPSTGSPFYTQNWRNPAAANPPSSLLPTVVAGSPFGAQHFMAAFYDAPDVTGLKETFAKYMAEQRWEDMKHLFDHWVRSLDAATGKPNHPDVDLFNHYLRANLMTRALPHEMLDLADHMLEFELQPNTASYNLVLKSMVASQETEGAEKLIER

SEQ ID NO: 10627 - protein, 348 aa, Pseudomonas putida
MLAIRKTKAGPGGLSVDDVAAPKEAHSTDVLVKVEAAGICGTDLLIYKWGEFAKRMKLPTILGHEVSGVIEQVGSDVKGLRPGMRVSLESHLPCGTCYTCRRGWAHVCPKTRYPGVDFDGGFASFVVVPESVCWPVPCGIPPLQATMMEPFGLAVHASLEGSGVSGLNVLVSGCGPIGLMNIAAAKALGASKVIATDIHPLRLTAAAKMGADECINATEESVYKTVRSLLGERGVDVAIDYSGQAAALKELIQSITHGGELRLMGVPSHDILLNLEEWLFKGLIVRGLHGRRLYETWERSTSLLVTGRVDLSSLVSHRLPLSAAEDAFEMALNGQSLKILFEPNGSCI

SEQ ID NO: 10628 - protein, 581 aa, Oryza sativa
  unsure (1)..(581): unsure at all Xaa locations
MGEVAEDIYTQDGTVDVKGNPATKKNTGNWRACPYILANECCERLAYYGMSTNLVNYMKTRLGQESAIAANNVTNWSGTCYITPLLGAFLADAYMGRFWTIASFMIIYILGLALLTMASSVKGLVPACDGGACHPTEAQTGVVFLALYLIALGTGGIKPCVSSFGADQFDENDEGEKRSKSSFFNWFYFSINIGALVASSVLVYVQTHVGWGWGFGIPAVVMAVAVASFFVGTPLYRHQRPGGSPLTRIAQVLVASARKWGVEVPADGSRLHETLDRESGIEGSRKLEHTGQFACLDRAAVETPEDRSAANASAWRLCTVTQVEELKSVVRLLPIWASGIVFATVYGQMSTMFVLQGNTLDASMGPHFSIPAASLSIFDTLSVIVWVPVYDRLIVPAVRAVXTGRPRGFTQLQRMGIGLVISVFSMLAAGVLDVVRLRAIARHGLYGDKDVVPISIFWQVPQYFIIGAAEVFTFVGQLEFFYDQAPDAMRSMCSALSLTTVALGNYLSTLLVTIVTHVTTRNGAVGWIPDNLNRGHLDYFFWLLAVLSLINFGVYLVIASWYTYKKTADSPDDKAEHAGAN

SEQ ID NO: 10629 - protein, 139 aa, Zea mays; identical to SEQ ID NO: 2652

SEQ ID NO: 10630 - protein, 152 aa, Nicotiana tabacum
AWHSAGTYDVCSKTGGPFGTMRLKAEQGHGANNGIDIAIRLLEPIKEQFPILSYGDFYQLAGVVAVEVTGGPDVPFHPGREDKTEPPVEGRLPDATKGSDHLRDVFVKQMGLSDKDIVALSGGHTLGRCHKERSGFEGPWTTNPLIFDNSYF

SEQ ID NO: 10631 - protein, 610 aa, Oryza sativa (japonica cultivar-group)
MPEAPTAKTAPAYGYAPGAHAEALEFIEHVTANAGQVQRRVLGEILAQNAPAEYLRRYGIPGSPDVVDAFRRLVPLVTYEGLQPDILRIANGDTSPIFSGKPISEFLTSSGTSGGERKLMPTIADEMNRRSLLYSLLMPVMSQSVSGLDKGKAMYLLFVKAESRTPGGLAARPVLTSYYRSRQFLDRPRDPYTSYTSPDEAILCVDSYQSMYAQLLCGLVHRADVLRVGAVFASGFLRAIHFLEKHWARLCHDIRTGELDPEITDRVVRDAVGRVLRADPALADAIEDECARASWEGIIRRLWPRTKYIDVIVTGTMSQYIPTLEFYGGGLPLTCTMYASSECYFGLNLNPMCKPSDVAYTLIPTMCYYEFLPVNCNNATAEASHRDLVDLVDVKLGHEYELVVTTYSGLYRYRVGDVLRVAGFKNKAPMFSFVRRQNVALSVDSDKTDETELHAAVSGAVQHLAPFGASLVEYTSYADAATIPGHYVLFWELRAGSTAVPASVFEECCLSVEEALNSVYRQGRACDRSIGPLEIRVVAEGTFDKLMDYAISRGASINQYKAPRCVRPGPVVELLDARVQGKYFSPKCPKWSPGNKQWNKSKDLVGKGDA

SEQ ID NO: 10632 - protein, 408 aa, Bacillus halodurans
MKAIQFDLSIPKYALSKAMGKMNSSLYVESPFSCLQLRDVEKPALPNDHWVEIKVKYGGICGSDLNLIFLNDSPATSPFVSFPFTLGHEMVGTISKARKSVTNLQVGQRVVIDPLLSCEVRGITPVCSECANGNYNLCHHMNDGDIAPGLLTGTCKDTGGSWGRYLVAHQSQVISLPSSVDDDNGVLVEPFACALHAVLQNRPKPSDTVFVIGSGVIGICVIAAIRALEIPCKIVTLAKHPFQAELAKQFGADEIVFLSRKRDYVTAVAESFNANVLHPVFGEPIVHGGADIVYECVGNRKSLHDSLRFARKGGKVVLIGLASFIDNLDMTMIWLNELEVKGSFTYGMEDWQGGKKRTLQIAVDLIADGKVDLSPLITHRFPLEAYREALATAANKKKGQTMKVVFEP

SEQ ID NO: 10633 - protein, 306 aa, Hordeum vulgare subsp. spontaneum
MATAGEVIKCKAAVAWEAGKPLSMEEVEVAPPQAMEVRDKILYTALCHTDVYFWEANGQTPVFPRILGHEAGGIVESVGKGVTELVPGDHVLPVFTGECKECAHCMSEESNLCDLLRINVDRGVMIDDGQSRFTIDGKPIFHFLGTSTFSEYTVIHVGCVAKIDPEAPLDKVCLLSCGISTGLGATLNVTKPKKGMTVAIFGLGAVGLAAMEGARMSGASRIIGVDLNPAKHEQAKKFGCTDFVNPKDHTKPVQEVIVEMTDGGVNRAVECTSNADAMISAFECVHDGWGVAHKEAVFKTHPMNFL

SEQ ID NO: 10634 - protein, 751 aa, Geobacillus stearothermophilus
MENQNRQNAAQCPFHGSVTNQSSNRTTNKDWWPNQLNLSILHQHDRKTNPHDEEFNYAEEFQKLDYWALKEDLRKLMTESQDWWPADYGHYGPLFIRMAWHSAGTYRTGDGRGGASTGTQRFAPLNSWPNNANLDKARRLLWPIKKKYGNKISWADLFILAGNVAIESMGGKTIGFGGGRVDVWHPEEDVYWGSEKEWLASERYSGDRELENPLAAVQMGLTYVNPEGPDGKPDPKAAARDIRETFRRMGMNDEETVALIAGGHTFGKAHGAGPATHVGPEPEAAPIEAQGLGWISSYGKGKGSDTITSGIEGAWTPTPTQWDTSYFDMLFGYDWWLTKSPAGAWQWMAVDPDEKDLAPDAEDPSKKVPTMMMTTDLALRFDPEYEKIARRFHQNPEEFAEAFARAWFKLTHRDMGPKTRYLGPEVPKEDFIWQDPIPEVDYELTEAEIEEIKAKILNSGLTVSELVKTAWASASTFRNSDKRGGANGARIRLAPQKDWEVNEPERLAKVLSVYEDIQRELPKKVSIADLIVLGGSAAVEKAARDAGFDVKVPFFPGRGDATQEQTDVESFAVLEPFADGFRNYQKQEYSVPPEELLVDKAQLLGLTAPEMTVLVGGLRVLGANYRDLPHGVFTDRIGVLTNDFFVNLLDMNYEWVPTDSGIYEIRDRKTGEVRWTATRVDLIFGSNSILRSYAEFYAQDDNQEKFVRDFINAWVKVMNADRFDLVKKARESVTALQFYSFVRSVTEEKLQ

SEQ ID NO: 10635 - protein, 182 aa, Ralstonia solanacearum
MKQLVIGLAAIGLMAGCASNAGTGASTGAPAAGTSALATLAPKSGSNVQGTIKLLQQGDSRVAMAVDIAGLPPNGMFGFHVHEKGDCSSPDGMSAGGHFNPTGQPHGDPRSGPHHAGDIPMLQSDASGKAVGSIVLNGVTLTPGATSLVGRAVIVHAGMDDYKTQPTGNSGGRVACGVIVAN

SEQ ID NO: 10636 - protein, 396 aa, Pseudomonas aeruginosa PAO1
MSRPQRISVLGATGSIGLSTLDVVQRHPDRYEAFALTGFSRLAELEALCLRHRPVYAVVPEQAAAIALQGSLAAAGIRTRVLFGEQALCEVASAPEVDMVMAAIVGAAGLPSTLAAVEAGKRVLLANKEALVMSGALFMQAVKRSGAVLLPIDSEHNAIFQSLPRNYADGLERVGVRRILLTASGGPFRETPLEQLASVTPEQACAHPNWSMGRKISVDSASMMNKGLELIEACWLFDAQPSQVEVVIHPQSVIHSMVDYVDGSVIAQLGNPDMRTPISYAMAWPERIDSGVSPLDMFAVGRLDFQRPDEQRFPCLRLASQAAETGGSAPAMLNAANEVAVAAFLERHIRFSDIAVIIEDVLNREAVTAVESLDQVLAADRRARSVAGQWLTRHAG

SEQ ID NO: 10637 - protein, 126 aa, Buchnera aphidicola (Uroleucon rurale)
NQFDILLCSNLFGDIISDECAVITGSIGMLPSASFNEKNFGLYEPAGGSAPDIAGKNIANPIAQILSLSMLVRYGMKLKKIADKIDKSVASALKAGYRTADISNNNSYLKTNEMGDVISDFLINGK

SEQ ID NO: 10638 - protein, 168 aa, Methanosarcina mazei
MKFFLKVLQRVCSLYERRKQIEAYIESSMEILAPNLALLAGPMLGARLISIAGSLEKLAAFPSSTIQVIGASKALFKHLRSRAPSPKHGIIYSHPLINTSPWWVRGKVARALAAKLSLAARIDFYSAKRNPSLENELEEKIRKIRAENPRPPQKRQEIRAKPKKKRRK

SEQ ID NO: 10639 - protein, 165 aa, Oryza sativa
MAAPDVDYRCFVGGLAWATDNRSLEAAFSTYGEILESKIINDRETGRSRGFGFVTFSSEQAMRDAIEGMSGKELDGRNITVNEAQSRRSGGGGGGGYGQRGGGGGYGGRGYGGGGGGGGYGQRREGGYGGGGGYGGGGGGGGYGGGYGGGYGSRGGGNSDGNWRN

SEQ ID NO: 10640 - protein, 109 aa, Oryza sativa
  unsure (1)..(109): unsure at all Xaa locations
XSNNIDSCHKLPSLLPCLHSSWDHCRAGDNNLSTVVVSXTLXELDALEADMEFESSAVPSYLQPDKESDFDAELNLPAAPTAPAAVPVSRQQVVDELGLPAVPRASIRS

SEQ ID NO: 10641 - protein, 296 aa, Listeria monocytogenes EGD-e
MKKNNWLQNAVIAMLVLIVGLCINMGSGTKVQAESIQRPTPINQVFPDPGLANAVKQNLGKQSVTDLVSQKELSGVQNFNGDNSNIQSLAGMQFFTNLKELHLSHNQISDLSPLKDLTKLEELSVNRNRLKNLNGIPSACLSRLFLDNNELRDTDSLIHLKNLEILSIRNNKLKSIVMLGFLSKLEVLDLHGNEITNTGGLTRLKKVNWIDLTGQKCVNEPVKYQPELYITNTVKDPDGRWISPYYISNGGSYVDGCVLWELPVYTDEVSYKFSEYINVGETEAIFDGTVTQPIKN

SEQ ID NO: 10642 - protein, 165 aa, Ralstonia solanacearum
MSDIYAFEADSLAGQRVPLSQYRGKVLLIVNTASQCGFTPQYAGLEAVYKRLNEKGLEVLGFPCNQFGKQEPGGAEEIGAFCEKNYGVSFPMFGKIEVNGSNAHPLYKWLTSEKPGVLGTEAIKWNFTKFLLRRDGTVYKRYAPLTKPEEMLGDIETLLAEPDPL

SEQ ID NO: 10643 - protein, 244 aa, Mycobacterium leprae
MATLAESPEPKSGASRAGVLGEEAGYHKGLKPRQLQMIGIGGAIGTGLFLGAGGRLAKAGPGLFLVYAVCGVFVFLILRALGELVLHRPSSGSFVSYAREFFGEKAAYVVGWLYFLDWAMTAIVDTTAIATYLHRWTIFTALPQWTLALLALAVVLVMNLISVEWFGELEFWAALIKVCALMAFLVVGTIFLGGRYPVDGHNTGLSLWTSHGGLFPTGVAPANSCQLRSDVRLRCRRTGRHRSR

SEQ ID NO: 10644 - protein, 360 aa, Pseudomonas fluorescens PfO-1
MSKQILILPGDGIGPEIMAEAVKVLELANEKYSLGFELSHDVIGGAAIDKHGVPLADETLDRARAADAVLLGAVGGPKWDTIERDIRPERGLLKIRAQLGLFGNLRPAILYPQLADASSLKPEIAAGLDILIVRELTGGIYFGAPRGTRTLENGERQSYDTLPYSESEIRRIARVGFDMARVRGKKLCSVDKANVLASSQLWREVVEQVAKDYPDVELSHMYVDNAAMQLVRAPKQFDVIVTDNMFGDILSDEASMLTGSIGMLPSASLDANNKGMYEPCHGSAPDIAGKGIANPLATILSVSMMLRYSFNLHEAADAIEKAVSVVLDQGLRTGDIFSTGCTKVGTQEMGDAVVAALRNL

SEQ ID NO: 10645 - protein, 390 aa, Burkholderia fungorum
MRAAGFRARNAPCIDRLTGAFTMKTKAAIAWKAGAPLTIEEVDLEGPRAGEVLIEVKATGICHTDYYTLSGADPEGIFPAILGHEGAGVIVDTGPGVGTLKKGDHVIPLYTPECRQCKFCLSRKTNLCQAIRSTQGKGLMPDSTSRFSIDGKPLFHYMGTSTFSNYIVVPEIAVAKVREDAPFDKICYIGCGVTTGVGAVVYSAKVEAGANVVVFGLGGIGLNVIQGAKMVGADRIIGVDINSGRVELAKKFGMTHFINPTEVENVVDHIVQLTDGGADYSFECIGNTKVMRQALECTHKGWGQSFIIGVAAAGEEISTRPFQLVTGREWKGSAFGGARGRTDVPKIVDWYMEGKINIDDLITHRLPLERINEGFDLMKKGESIRSVVLY

SEQ ID NO: 10646 - protein, 399 aa, Glycine max
MEDQNGSGKLSQGLRKVKPYLAILSLQFGYSGMYIITMVSFKHGMSHWILSVYRHVVAAIIIVPFALVLERKIRPKMTLPIFLRIVALGFLEPVLDQNLYNMGMKMTSTTFASATVNVLPAITFVMALIFRLEKVNLRKFHSVAKVIGTLITVSGAMVMTLYKGPAFQIIKGGGAISNHSNSSSTSTTEPSDQHWIVGTVYLISSCASWAGFFILQSFTLKKYPAELSLTAWICVMGIIEGSIASLIFERDFSVWAIGWDSRLLACVYSGVICSGMAYYVQGVVTRERGPVFVTSFSPLCMIITAALGSLVLAEQVHLGSIFGAILIVCGLYTVVWGKSKDRKSTTEIEKGESQELPIKNGTKSASDIFDGIEINVPSEVLKKGGGKNVPPATTTTTTS

SEQ ID NO: 10647 - protein, 157 aa, Zea mays; identical to SEQ ID NO: 642

SEQ ID NO: 10648 - protein, 183 aa, Streptococcus pneumoniae R6
MKSIGTQILQTERLILRRFVESDAEAMFQNWASSAENLTYVTWDPHPDVEITRNSIRNWVASYTNLNYYKWAICLKENPEQVIGDISIVKIDEADLSCEIGYVLGKAYWGHGMMTEALKAVLDFCFTQAGFQKVRARYASLNPASGRVMEKAGMSYLQTIVNGVERKGYLADLIYYGISREEC

SEQ ID NO: 10649 - protein, 110 aa, Pyrococcus horikoshii
MVKFCPRCGSIMIPDKKRGVFVCRKCGYEEPINPEDAKAYRRTEEIKHKPDEGVIVIEQDFSTLPTAKVTCPKCGYHEAWYWEVQTRAGDEPSTIFYKCKRCGYVWRSYE

SEQ ID NO: 10650 - protein, 751 aa, Geobacillus stearothermophilus
MENQNRQNAAQCPFHGSVTNQSSNRTTNKDWWPNQLNLSILHQHDRKTNPHDEEFNYAEEFQKLDYWALKEDLRKLMTESQDWWPADYGHYGPLFIRMAWHSAGTYRIGDGRGGASTGTQRFAPLNSWPDNANLDKARRLLWPIKKKYGNKISWADLFILAGNVAIESMGGKTIGFGGGRVDVWHPEEDVYWGSEKEWLASERYSGDRELENPLAAVQMGLIYVNPEGPDGKPDPKAAARDIRETFRRMGMNDEETVALIAGGHTFGKAHGAGPATHVGPEPEAAPIEAQGLGWISSYGKGKGSDTITSGIEGAWTPTPTQWDTSYFDMLFGYDWWLTKSPAGAWQWMAVDPDEKDLAPDAEDPSKKVPTMMMTTDLALRFDPEYEKIARRFHQNPEEFAEAFARAWFKLTHRDMGPKTRYLGPEVPKEDFIWQDPIPEVDYELTEAEIEEIKAKILNSGLTVSELVKTAWASASTFRNSDKRGGANGARIRLAPQKDWEVNEPERLAKVLSVYEDIQRELPKKVSIADLIVLGGSAAVEKAARDAGFDVKVPFFPGRGDATQEQTDVESFAVLEPFADGFRNYQKQEYSVPPEELLVDKAQLLGLTAPEMTVLVGGLRVLGANYRDLPHGVFTDRIGVLTNDFFVNLLDMNYEWVPTDSGIYEIRDRKTGEVRWTATRVDLIFGSNSILRSYAEFYAQDDNQEKFVRDFINAWVKVMNADRFDLVKKARESVTALQGGNGVRSNIKGILQ

SEQ ID NO: 10651 - protein, 486 aa, Schizosaccharomyces pombe
MTATKEESQKLLTSLRSQRDNKVCFDCGAKNPTWSSTTFGIYLCLDCSAAHRNMGVHISFVRFLRSTVLDSWTYAQLRVMRVGGNENARNYFKRHGGVSLLNSKDCRLKYSSKTAKQYLEKLKSLAVEDEANYPDILDMDFLSNTHEGSSAADTTNEDDDFFSAWDKASVKKSDDNLDDKTDLASTSSSVVVESGEKDEPVVVTEEKTMVSPPSRPDSTSTTKSKTSSISSARARPIRASSRPTASKLGASRPQKLGIKKANADIDFDEFEKAVLSSESAPTKKPAAVASKESTVDTLVDNGVEEVKESTSTTVQGKPVKPVLKSAASAKSTKSDDSNLNANFARLGFGQFAAASNARAKAAAKARELKKNEVNAPTYARDHFASQKSISSDQYFGRGSFDPEAAAEAQERLSSFRDATAISSKSYFGEEEDENEEGESSHRPDSAYLRDIAETATEDIEAIKVAIHQGAEKLSDFIQKVGARYNF

SEQ ID NO: 10652 - protein, 524 aa, Oryza sativa
MALYLLFESASGYGLFHAYGIDEIGQSVDAVRASVVDLDRFGKAVKLAAFTPFSSAVDALNQCNAISEGIMTDELRSFLELNLPKPKEGKKAKYSLGVVEPKVGSHISEVTGIPCQSNEFVQELLRGVRLHFDRFISELKKSDLEKAQLGLGHSYSRAKVKFNVNRVDNMVIQAIFLLDTLDKDINSFSMRVREWFGWHFPELVKIVNDNYIYAKLADYIKDKSELAEKDISKLADLIGDEDKAKEVVEAAKASMGQDLSEVDLMNVKQFAQRVMNLSEYRKKLHGYLVTKMNDIAPNLTSLIGEVVGARLISHAGSLSNLAKCPASTLQILGAEKALFRALKTRGNTPKYGLIFHSSFIGRASTKNKGRMARYLANKCSIASRIDCYSESATAVFGQKLREQVEERLDFYDKGVAPRKNLDVMKAAIDNATNDVDDGEKVDASAKKSKKKKSKAEADGEAMDLDKPSNEKKKKKKKHKLEEAEENGTPKKKKKKNREVSEDAEPKTATEGKKKKKKSKTEDSD

SEQ ID NO: 10653 - protein, 99 aa, Triticum aestivum
  unsure (1)..(99): unsure at all Xaa locations
MKKIFGAKKSQDPPPSIQDATDRIYKRGDTVDEKIKKLDAELARYKDQIKKTRPGPAQEAVKARAMRILKQRKMYEGQRDMLYNQTYNLDQVAXASXGI

SEQ ID NO: 10654 - protein, 144 aa, Glycine max
  unsure (1)..(144): unsure at all Xaa locations
PWTCPGDDVFYNASIIWGVVGPKRMFTKDGVYPGMNWFFLIGLLAPLPVWLLSRKFPNHKWIQLINFPIIIACASNIPPFRSVSYITWGIVGIFFNFYVYRKFKASWAXNGIFGPTWWGLDADHCHLAKCPTAPDVHAKGCPLL

SEQ ID NO: 10655 - protein, 195 aa, Zea diploperennis
APLDKVCVLSCGISTGLGASINVAKPPKGSTVAVFGLGAVGLAAAEGARIAGASRIIGVDLSPSRFEEARKFGCTEFVNPKDHNKPVQEVLAEMTNGGVDRSVECTGNINAMIQAFECVHDGWGVAVLVGVPHKDAEFKTHPMNFLNERTLKGTFFGNYKPRTDLPNVVELYMKKELEVEKFITHSVPFAEINKA

SEQ ID NO: 10656 - protein, 173 aa, Helicobacter pylori
MNLDQLEVSHDANALCVVIEISKHSNIKYELDKESGALMVDRVLYGAQNYPANYGFVPNTLGSDGDPVDALVLSDVAFQAGSVVKARLVGVLNMEDESGMDEKLLALPIDKIDPTHSYVKDIDDLSKHTLDKIKHFFETYKDLEPNKWVKVKGFENKESAIKVLEKAIKAYQG

SEQ ID NO: 10657 - protein, 197 aa, Oryza sativa
  unsure (1)..(197): unsure at all Xaa locations
XTGRGSRQPRSGGPPPHQGAIRVVLLRRSCVPQRLQAPSXSSPPPPPPPPKPTSGRFYSVIPGGSRLPKSMLKTDIIHHLDKSELSLDDVKIDYHRGYYPVGALLRFSSVPLFNTAVRQXXREGRQYRLEMISREEFDLKQSYDGKAILLQGVPRNAVPEDIERFLCGTNVEPPPFESFLRAGGSAEMELRLKPQRX

SEQ ID NO: 10658 - protein, 114 aa, Glycine max
  unsure (1)..(114): unsure at all Xaa locations
MEFCPSWGNQLQYEMPYMGRPSRFFCSACPYVCHIENRVEIKRKQRLVRKEIEPIFSEDDMTNAPSTEATCPFCGHGKAAFKEFQTRSADEPATLXYKCWNNDCKKQWREGDFN

SEQ ID NO: 10659 - protein, 173 aa, Helicobacter pylori
MNLEKLEVSHDASVLSVVIEISKHSNIKYELDKESGALMVDRVLYGAQNYPANYGFVPNTLGSDGDPVDALVLSDVAFQAGSVVKARLVGVLNMEDESGMDEKLLALPIDKVDPTHSYVKDIDDLSKHTLDKIKHFFETYKDLEPNKWVKVKGFENKESAIKVLEKAIKAYQG

SEQ ID NO: 10660 - protein, 178 aa, Oryza sativa
  unsure (1)..(178): unsure at all Xaa locations
MMSSSSSPPPPSIPTGGGGFFRGYTKLCKGLAVILLLVHLLIQLFPSAVTYLALVPGRTIPFAWNLITGGYVELTIPGVIISIVGLLLFGKLLEPLWGSKELSKFIFVVNFSTSVCVFITAIALYYTTQEESYLYAPLSGFYGVLTGLLVGIKQLMSEQELIVLKIKAKWIPSLVALX

SEQ ID NO: 10661 - protein, 475 aa, Mentha x piperita
MALNLMAPTEIKTLSFLDSSKSNYNLNPLKFQGGFAFKRKDSRCTAAKRVHCSAQSQSPPPAWPGRAFPEPGRMTWEGPKPISVIGSTGSIGTQTLDIVAENPDKFRIVALAAGSNVTLLADQKAFKPKLVSVKDESLISELKEALAGFEDMPEIIPGEQGMIEVARHPDAVTVVTGIVGCAGLKPTVAAIEAGKDIALANKETLIAGGPFVLPLAKKHNVKILPADSEHSAIFQCIQGLPEGALRRIILTASGGAFRDLPVEKLKEVKVADALKHSNWNMGKKNTVRLLQLFFNKGLEVIKAHYLFGAEYDDIEIVIHSPSIIHSMVETQDSSVLAQLGWPDMRLPILYTLSWPERVYCSEITWPRLDLCKVDLPFKKPDNREIPAMDLAYAAWKSRSTMTGVLSAANEKAVEMFIDEKIGYLDIFKVVELTCDKHRSEMAVSPSLEEIVHYDQWARDYAATVLKSAGLSPALV

SEQ ID NO: 10662 - protein, 384 aa, Zea mays
MAGDDGSGGSGGGNREDEVHVQIAGSSKPETSSTNETSPQNSHTKHWHWWLMVTLNIFFLVAGQTASTLLGRFYYNQGGNSKWMSTFVQTAGFPVLFVALYLFRSKSPSTQTTTSNPETSVTKITLIYVVLGLIIAADDLMYSYGLLYLPVSTYSLICASQLAFNAVFSYVLNAQKFTPFIFNSVILLTFSAALLGVDEDSQGTNGLSRGKYILGFALTLGASATYSLILSLMQVAFEKVIKKETFSVVLNMQIYTALVATVASLIGLFASGEWKTLEGEMHAFSSGRVSYVMTLLWTAVSWQIASVGVVGLIFVVSSLFSNVISTLALPIIPIFAVIFFHDKMDGVKIIAMLMAIWGFVSYGYQLYVSDKKARKTSVSVEENS

SEQ ID NO: 10663 - protein, 379 aa, Oryza sativa (japonica cultivar-group); identical to SEQ ID NO: 6499

SEQ ID NO: 10664 - protein, 501 aa, Enterococcus faecium
MGLFAEIRLRCDDKGYVGKTERKIGRDGIKQEPHPKSFLYFWDWLWYERGQGMEEYQATPVKEVKIENELKRTMGFFTALSTVMGTVIGAGVFFKAASVAEVTGSASLHMFSWFLGGMISVCAGLTGAELAAAIPETGGMIKYIERIYGNTAAFLLGWAQVVIYFPANVAALSIIFGTQFVNLFGLSQSMIVPVAVTAAVSILLINFLGSKAGGAFQSITLVCKLIPLFVIVIFGLFRQEGVDFQLFPIQAGENLSFFSALGAGLLATMFAYDGWIHVGNISGELKKPAKDLPKAISLGIIGIMIVYLLVNAVFLRTASIDGVAGNSNAASDVAKMIFGGFGGRLVTVGILISVYGTINGYTLTGMRLPYVMAKENNLPFSKLFAKLHDKTKVPVAAGILELVIAIGMMMIGGFDTLTDMLIFVIWIFYTMVFVGVILLRKKEPDLFRPYKVPMYPFIPLVAIIGGTFIVSSTLITQTFLASMGIVLTLAGIPIYLYLKRR

SEQ ID NO: 10665 - protein, 392 aa, Mascagnia chasei
DLEPVNPADVPVTAAGALKSYKLASKAISRLQSLPSGNISLLCDVLVKEVRDLTGYDRVMVYKFHEDEHGEVVSECRRSDLESYLGLHYPATDIPQASRFLFMKNKVRMICDCLAPPVEVIQDERLAQPLSLCGSTLRSPHGCHAHYMTNMGTIASLVMAVTINEDDDMMDGDQQQMTRKLWGLVVCHHTSPRFVPFPLRYACEFLIQVFGVQIHKEVELAAQVREKHILQIQTMLCDMLLRDAPVAIIMQSPNVMDLVKCDGAALYFKKKTWLLGVTPTEEQIRDIAEWLLEYHSGNTGLSTDSLMEAGYPGSSALGDAVCGMAAVSITSRDFLFWFRSHTAKEIKWGGAKHDPDVKDDGRKMHPRSSFKAFLEVVKWRSMPWEDIEMDAI

SEQ ID NO: 10666 - protein, 372 aa, Zea mays
MENSAAAAAERPRLTRAAAKRSAVVTAVAVAAKRKRVALSQLPTLPNAVLGAHDDDDDKPVRKQRLLPAAKPKPKPKAAPAPAAPAAADDTDDDIQLCKPYASDIYSYLRSMESQAKRRLAVDYIAAVQIDVTPNMRGILIDWLVEVAEEYKLVSDTLYLTVSYIDRFLSAKVLNRQKLQLLGVSAMLIASKYEEISPPNVEDFCYITDNTYTKQEVVKMESDILNVLKFEVGSPTAKTFLRMFIRSAQEDNKKYPSLQLEFLGSYLSELSLLDYGLIRSLPSLVAASAVFVARLTLDPHTHPWSKKMQTLTGYKPSELKDCVAAIHNLQLNRTCQSMVAIREKYRQHRFKGVSALLPPVEIPASYFNTLKE

SEQ ID NO: 10667 - protein, 167 aa, Clostridium perfringens str. 13
MLIEIRGKKPEIGEKTFIAHSSDIIGDVTIGRDCGIWFGSVIRGDDNLIKIGNETNVQDNAVLHVDKEHTIEIGSGVTIGHGAIIHGCKIEDECLIGMGAIILNGAKIGKNTMIAAGTLVSQNKEIPEGVLVMGVPGKVVRKLTEDEIESIKNSRREYVKMKNLYIK

SEQ ID NO: 10668 - protein, 390 aa, Bacteroides thetaiotaomicron VPI-5482
MDSEKKNKKKQIAILGSTGSIGTQALQVIEEHPDLYEAYALTANNRVELLIAQARKFQPEVVVIANEEKYAQLKEALSDLPIKVYAGIDAVCQIVEAGPVDMVLTAMVGYAGLKPTINAIRAKKAIALANKETLVVAGELINQLAQQYHTPILPVDSEHSAVFQCLAGEVGNPIEKVILTASGGPFRTCTLEQLKSVTKTQALKHPNWEMGAKITIDSASMMNKGFEVIEAKWLFGVQPSQIEVVVHPQSVIHSMVQFEDGAVKAQLGMPDMRLPIQYAFSYPDRICSSFDRLDFTQCTNLTFEQPDTKRFRNLALAYEAMYRGGNMPCIVNAANEVVVAAFLRDGISFLGMSDVIEKTMERAAFVAAPAYDDYVATDAEARRIAAELIP

SEQ ID NO: 10669 - protein, 724 aa, Bradyrhizobium sp. ORS278
MPVPLTTPAFGHATLANCEREQIHLAGSIQPHGILLAVKEPDNVVIQASINAAEFLNTNSVVGRPLRDLGGDLALQILPHLNGPLHLAPMTLRCTVGSPPRRVDCTVHRPSNGGLIVELEPATKTTNVAPALDGAFHRITSSSSLIGLCDETATIFREITGYDRVMVYRFDEEGHGEVLSERRRPDLEAFLGNRYPASDIPQIARRLYERNRVRLLVDVNYTPVPLQPRISPLNGRDLDMSLSCLRSMSPIHQKYLQNMGVGATLVCSLMVSGRLWGLIACHHYEPRFVPFDIRAAGEALAETCAIRIAALESFAQSQSELVVRRLEQRLVEAVSRDGEWQAALFDGSQSLLQPLGASGAALLFEGQVMTAGDVPSTQRIRDLATWLDRRRKAPDAPPQGLTVTASLTLDDPSFADIRSIASGLIAAPLSASEGEYLLWFRPEQVRTVTWGGDPLKAVIIGDDPSDLSPRRSFAQWHQLVEGKSEPWSPAELASARLVSETVADVALQLRSVRMVIAQDQLATISAQVLRSEQPVIIADVEGRILLLNEAFEQQLRASHPHIPHLRDLGAYCTAPAEFRANLDDLMRNKRSWRGELTLTGGATPQRPLMVRADPVIAPHDRVLGFVLIFSDLTERKTAEAARARFQEEIDGARRPSLRLDQSASLIYKELAASTVENAQLAALEVTHGAEAGSMPEMLESIRNSTARTLGILEHLVWYRSQSEE

SEQ ID NO: 10670 - protein, 173 aa, Helicobacter pylori
MNLEKLEISHDANALCVVIEISKHSNIKYELDKESGALMVDRVLYGAQNYPSNYGFVPNTLGSDGDPVDALVLSDVAFQAGSVVKARLVGVLNMEDESGMDEKLLALPIDKIDPTHSYVKDIDDLSKHTLDKIKHFFETYKDLEPNKWVKVKGFENKESAIKVLEKAIKAYQG

SEQ ID NO: 10671 - protein, 383 aa, Triticum aestivum
  unsure (1)..(383): unsure at all Xaa locations
MGGEKENLDLSDLNSSLPAAAAALSAEDRVGLVNALKDKLQSLAGQHADVLESLSPNVRTRVEFLRGIQSQHDEIEAKFFEERAALEAKYQKLYEPLYAKRYDIVNGVVEVDGAAKEPTSENAAEGGDSDAKGIPDFWLTALKTNDVLTEEIQERDEPVLKYLKDIKWSRIDDPKGFKLEFFIDTNPFFKNSVLTKSYHMVDEDDPILEKAIGTEIEWYPGKNVTQKILKKKPKKGSKNTKPITXKTEECESFFNFFSPPQVPDDDEDIDEEAADELQGQMEHDYDIGSTIRDKIIPHAVSWFTGEAVQAEDFDDMEDGDEDDDDEDDDDEEDDEEDEDEDEDDDEDEEELSKPTKKVAGKPKGPAKGGAQGNAEQPTECKQQ

SEQ ID NO: 10672 - protein, 474 aa, Bacillus cereus ATCC 14579
MQQKKWGFWVLTAFVVGNMVGAGIFMVPSTLAQTASPLGVTLAWLTTGFGVLMLALVFGNLAIRRPDLTTGPQSHAYALFSTPKKKKMAGFSMVWGYWVANWASNVAIITSFAGYLSLFFPIMKDTRLLFSIGSFNVEVGKLITFTICSILLWGTHIILTNGVSGAGKLNFLATTTKVTGFLLFIVVTLFAFEASKFGQWYTPMIDKSGASHGLLSQVNLAALTTLWAFIGIESAVLLSNRAVSPKTVKRATVAGLLITVAIYLGITILTMGVLHVDKLQASERPLADALNAAMGHGGGKLMALLALTSLFGSILGWILLSSEVPYQAAKEGFFPSFFTKTNKKGSPIYSLRLTNIMSQVFLFSTLSGTIAEAYTFVITVSTLAYLIPYLVSPIFQLKLVATGETYKNEMRARITDGIVAVIALCYALWVIKTGASDIKTFLLGIGLFVIGFAFYPLMNRDQKKNNEKKNGQVA

SEQ ID NO: 10673 - protein, 227 aa, Bacillus halodurans
MITSSFGIILTVIIYFLTVKLHKKVNNPLTLPILVATGCIVALLLLTDISYKTYYSSAKWIEHLLGPAVVALAFPLYKQFKRLKSYFVPITIGIFIGAIVGVGSGVLMAKLLGFDEQLIASVAPKSITTPVAMEVAQSLGGIPPIAALFVMVAGIGGAVLCTVLSKISGIHHHIAKGVSIGTASHAIGTAKAMEDHPQEGAASTLAMSISAMLVAGLLPLLQILLAN

SEQ ID NO: 10674 - protein, 365 aa, Averrhoa carambola
ALSIAGAVQSQKLAVRAISQLQLLPGGDIKLLCDTVVESVRELTGYDRVMVYKFHEDEHGEVVAESKRPDLEPYIGLHYPATDIPQASRFLFKQNRVRMIVDCNAKPVRVIQDEGLMQPLCLVGSTLRAPHGCHAQYMANMGSIASLAMAVIINGNDEEAIGGRNSMRLWGLVVCHHTSARCIPFPLRYACEFLMQAFGLQLNMELQLASQLSEKHVLRTQTLLCDMLLRDSPTGIVTQSPSIMDLVKCDGAALYYQGKYYRLGVTPTEAQIKDIIEWLLAFHGDSTGLSTDSLADAGYPGATSLGDAVCGMAVAYITKTDYLFWFRSHTAKEIKWGGAKHHPEDKDDGQRMHPRSSFKAFLEVV

SEQ ID NO: 10675 - protein, 590 aa, Glycine max
  unsure (1)..(590): unsure at all Xaa locations
MGEIEEIGADVCSDIEVDDIRCPNIAEKDVSDEEIEAEELERRMWKDRIKLKRLKEKQKLEAQQAAEKQKPRQSSDQARRKKMSRAQDGILKYMLKLMEVCKARGFVYGIIPEKGKPVSGSSDNIRAWWKEKVRFDKNGPAAIAKYEADCLAMSEADNXRNGNSQSILQDLQDATLGSLLSSLMQHCDPPQRKYPLEKGIPPPWWPTGNEDWWSQLNLPHGQSPPYKKPHDLKKMWKVGVLTAVIKHMSPNIAKIRRHVRQSKCLQDKMTAKESAIWLGVLSREEALIRQPSSDNGTSGITGVPPGVPVENKQAATSSASNYDVDGTDDGIGSVSSKENRRNHFMVTEPSDNLRRGRKPVQDTDQSEKQPRPKKPRRANDKPPAQADNEILHVEPRSKGININQTEAQVVGVQIHGNEQSNETDSAARPLERGLEVPAQLPVPEVDQYSYLHTNNLVSSESMYMSGKPMHYPELQNPDMHHETTYNLYNPAAGYEPGQDGQQLHSANNEAVRLENDAVSLQGVHMKGDGINGGDLQYFGKDAFQNELDRPMDHSFFGSPLSMSLDFGALGSPFHLDDFVCEDEMIQYFGA

SEQ ID NO: 10676 - protein, 262 aa, Hordeum vulgare subsp. spontaneum
SAESNMCDLLRINTDRGVMIGDGKSRFSIGGKPIYHFVGTSTFSEYTVMHVGCVAKINPEAPLDKVCVLSCGISTGLGASINVAKPPKGSTVAIFGLGAVGLAAAEGARIAGASRIIGVDLNASRFEEARKFGCTEFVNPKDHTKPVQQVLADMTNGGVDRSVECTGNVNAMIQAFECVHDGWGVAVLVGVPHKDSEFKTHPMNFLNERTLKGTFFGNFKPRTDLPNVVEMYMKKELEVEKFITHSVPFSEINKAFDLMAKG

SEQ ID NO: 10677 - protein, 149 aa, Lycopersicon esculentum
MAEQLTEEQIAEFKEAFSLFDKDGDGCITTKELGTVMRSLGQNPTEAELQDMISEVDADQNGTIDFPEFLNLMARKMKDTDSEEELKEAFKVFDKDQNGFISAAELRHVMTNLGEKLTDEEVDEMIREADIDGDGQVNYEEFVRMMLAK

SEQ ID NO: 10678 - protein, 277 aa, Magnetospirillum magnetotacticum
MTTTSDDTAPRPALRRLGRSGLAVSAVGLGCNNFGRPTTATETLEGTRAVVDAALDAGVTFFDTADTYGGRPGLSEELLGQALGSRRDDVVVATKFGLSMRGVAGADFDARGSRRYVVRAVEDSLRRLGTDRIDLYQFHAPDPRTPIDETLAALDDLVRAGKVLYVGHSNRAGWQIAEAEFVARAAGTVRFVSAQNQYNLVDRAAELEVLPAAAAYGLGVLPYFPLANGLLTGKYAHGARPDDGRLVRTKPHLLESAPLGGARAARRVLQMRASGTT

SEQ ID NO: 10679 - protein, 283 aa, Triticum aestivum
  unsure (1)..(283): unsure at all Xaa locations
MAKTYPVVSAEYQEAVEKARQKLRALIAEKNCSPLMLRLAWHSAGTFDVSSKTGGPFGTMKKPAEQAHAANAGLDIAVRMLEPIKEEIPTISYADLYQLAGVVAVEVSGGPVIPFHPGREDKPQPPPEGRLPDATKGSDHLRQVFGKQMGLSDQDIVALSGGHTLVSLHICSICFHVIYLDRCMHALTLFSCVSLFLXGRCHKERSGFEGPWTRNPLKFDNSYFTELLSGDKEGLLQLPSDKTLLTDPVFRPLVEKYAADEKAFFEDYKEAHLRLSELGYAEA

SEQ ID NO: 10680 - protein, 324 aa, Synechococcus sp. PCC 7942
MRILVTGGAGFIGSHLIDRLMSAGHEVICLDNYFTGRKHNVAQWYGHPRFELIRHDITDPIRLEVDQIYHLACPASPVHYQYNPIKTAKTSFLGTVNMLGLAKRVKARLLMASTSEVYGDPHVHPQTEDYWGNVNPIGIRSCYDEGKRVAETLCFDYHRQHNLEIRVARIFNTYGPRMLENDGRVVSNFIVQALQGQPLTVYGRGEQTRSFCYVSDLVDGLIRLMNGDHLGPVNLGNPSEYTILQLAELIRDRIDPALPIEFRPLPQDDPQQRRPDISRAQAWLKWQPLVSVQDGLDRTIADFRDRQQAAATLIADRLPEGSIS

SEQ ID NO: 10681 - protein, 787 aa, Triticum aestivum
MTTDQPVISLRPGGGGGGPRGGRLFAPAFAVAASGSGDFLRPHGGGAFRALQDWCLHLSHERVRYSRDQLLDLRKITDVTEQILRLQQEIEAELHGDDQSWVRNDSNVQLQTQTQTQVQAQNRFTETDNRDWRARTEKPPAPAVPEEKSWDNIREVKEQYNASGRQQEQFNRQDQSSSQKAQVGPPPALIKADVPWSARRGNLSEKDRVLKTVKGILNKLTPEKFDLLKGELLDSGITTADILKDVISLIFEKAVFEPTFCPMYAQLCSELNDNLPKFPSEEPGGKEITFKRVLLNNCQEAFEGADSLRVEIASLTGPDQEMEKRDKERIFKLRTLGNIRLIGELLKQKMVPEKIVHHIVKELLGSDKKACPDEEHVEAICQFFNTIGKQLDENPKSRRINDTYFVHLRELVANPQLTPRSKFMVRDLIDLRSNNWVPRRAEIKAKTISEIHTEAEKNLGLRPGATANMRNGRNAPGGPLSPGGFSVNRPGTGGMMPGMPGSRKMPGMPGLDNDNWEVQRSRSMPRGDPLRNQGSLINKVSSINKPSPINPRLLPQGTGALIGKSALLGTGGPPSRPSSITASPTPLPAQTTASPKPSSATPASVPIPDKAASSAKVIPAGLEKKTASLLEEYFGIRILDEAQQCIEELQSPDYHPEIVKEAINLALDKGASFVDPLVKLLEHLYTKKTFKTEDLENGCLLYGSLLEDIGIDLPKAPTQFGEVIARLILSCGLRFEAVEGILKAMEDTFFRKAIFTSVTKTLEADPAGQAILSSHAAVVDACNSLSI

SEQ ID NO: 10682 - protein, 310 aa, Schizosaccharomyces pombe
MDVSTQTRHATYFQDENQLQKDHIYVKKKSHIKLNTGVRAPFKAVDNINQQDEPTLIEGNNESSISSSTGDTFEEDFAYQDKVEIEERSIRSTPKSIGDDDLENREGSFDAPEGILTHGKHRLPTIPEWTKEDLAALSEAAARLQANPSPEDIETDPSMVPDYDPEIFHYMQSLERKLAPPPNYMSVQQEIDWVTRHMLVDWIVQVQIHFRLLPETLFLAVNLIDRFLSIKVVSLQKVQLVGLSALLIACKYEEIHPPSIYNFAHVVQGIFTVDEIIRAERYMLMLLDFDISWPGPMSFLRRISRADSYD

SEQ ID NO: 10683 - protein, 166 aa, Glycine max
  unsure (1)..(166): unsure at all Xaa locations
DCFGDPQTNGNIGPEIEAFQCSWLVVKALEFSNEQPKXVLHEHSGKADPQHVGQLKALYNELNPQAAIXSIRTGRYPKLVSSSEGHPNKPVQAELKSLLGQISKRHKQSRVKVRARTVAHAIQTSVVISIYPRIRFPGMEIFEKMILLPVTLFNISFLRIRSCGFL

SEQ ID NO: 10684 - protein, 302 aa, Glycine max
FNTALKKKNFSLVFSPPPSLTLHPHAHFCPSMSILRRLHLNLCTTTRRRRLATASAALRQDTTVWTPAPLSKVEHAAESLFHIAIDVSDAPDHAASHTLAGQYLQLRFPVSPTPPFLDIASPPKLAAARGVFEFLVKSVAGSTAEALCALKRGDVVELSQVMGNGFNIDRIHPPKNFGTVLVFATGSGISPIRSLIESGFDAAKRSDVRLYYGARNLQRMAYQDRFKDWESSGVKIVPVLSQPDESWTGESGYVQAAFSREKPISDPLATGAVLCGQKQMTEEVTSILVAAGVSADKILKNF

SEQ ID NO: 10685 - protein, 393 aa, Canella winterana
DLEPVNPTDVPVTAAGALKSYKLAAKSISRLQSLPSGNIQLLCDVLVREVSDLTGYDRVMAYKFHEDEHGEVIAECRRSDLEPYLGLHYPATDIPQASRFLFMKNKVRMICDCSAPPVKVIQDKRLAQSLSLCGSTLRAPHGCHAQYMANMGSIASLVVSVTVSEDDDETESEQQQKGRKLWGLVICHHTCPRFVPFPLRYACEFLIQVFGIQLNKEVDLASQIREKHMLRTQTMLCDMLLRDAPVGIVTQSPNVMDLVKCDGAALYYKNQFWLLGTTPTEAQIRDITNWLVEYHNSTTGLSTDSLAVAGYPGASVLGDAVCGMAAVKFTNKDLLFWFRSHTAKEIMWGGAKHDPVDKDDDGRKLHPRSSFKAFLEVVKRRSLPWEDVEMDAI

SEQ ID NO: 10686 - protein, 440 aa, Zea mays
MEMHADVDGCSVPLAVLLKRELCNQKVERPDILFGEANKSKKGEDFTLLVPRCHRTPGGSGGGENAGDDDTISVFAIFDGHNGSAAAIYTRENLISSVLAAIPPNLTSEEWKAALPRALVAGFVKTDKNFQIKAARSGTTVTFVIIDGWVVTVASVGDSRCILESAEGSVYFLSADHRLDANEEEVERVTASGGEVGRINIAGGAGIGPLRCWPGGLCLSRSIGDIDVGEFIVPVPHVKQVKLSNAGGRLVIASDGVWDALRFQEALNYTRGLPAEAAANRIVKEAVTSKGLRDDTTCIVVDILPPEKLSPPLKRPGKGVIKALFRRRPSDEMSEDQMDRGCLEIDVVEEIYEEGSAMLARRLNINYPEGNMFKLHDCAVCQLEMKPGEGTSVHGNMPKHSRVDPWGGPFLCSSCQLKKEAMEGKLHSRNSQSAVQPLPK

SEQ ID NO: 10687 - protein, 400 aa, Umbelopsis isabellina
MAPPNTIDAGLTQRHITTTAAPTSAKPAFERNYQLPEFTIKEIRECIPAHCFERSGLRGLCHVAIDLTWASLLFLAATQIDKFENPLIRYLAWPAYWIMQGIVCTGIWVLAHECGHQSFSTSKTLNNTVGWILHSMLLVPYHSWRISHSKHHKATGHMTKDQVFVPKTRSQVGLPPKESAAAAVQEEDMSVHLDEEAPIVTLFWMVIQFLFGWPAYLIMNASGQDYGRWTSHFHTYSPIFEPRNFFDIIISDLGVLAALGALIYASMQLSLLTVTKYYIIPYLFVNFWLVLITFLQHTDPKLPHYREGAWNFQRGALCTVDRSFGKFLDHMFHGIVHTHVAHHLFSQMPFYHAEEATYHLKKLLGEYYVYDPSPIVVAVWRSFRECRFVEDHGDVVFFKK

SEQ ID NO: 10688 - protein, 476 aa, Arabidopsis thaliana
MALQRQLLKRATSDIYHRRAISLLRTDFSTSPSIADAPPHIPPFVHQPRPYKGPSADEVLQKRKKFLGPSLFHYYQKPLNIVEGKMQYLYDESGRRYLDAFAGIVTVSCGHCHPDILNAITEQSKLLQHATTIYLHHAIGDFAEALAAKMPGNLKVVYFVNSGSEANELAMMMARLYTGSLEMISLRNAYHGGSSNTIGLTALNTWKYPLPQGEIHHVVNPDPYRGVFGSDGSLYAKDVQDHIEYGTSGKVAGFIAETIQGVGGAVELAPGYLKSVYEIVRNAGGVCIADEVQTGFGRTGSHYWGFQTQDVVPDIVTMAKGIGNGLPLGAVVTTPEIASVLASKILFNTFGGNPVCSAGGLAVLNVIDKEKRQEHCAEVGSHLIQRLKDVQKRHDIIGDVRGRGLMVGIELVSDRKDKTPAKAETSVLFEQLRELGILVGKGGLHGNVFRIKPPMCFTKDDADFLVDALDYSISRL

SEQ ID NO: 10689 - protein, 231 aa, Streptococcus agalactiae 2603V/R
MATLTNNPIFGIMLTVWAYYIGIRIFRKYPSPATTPLLLATILLIAFLKLTHISYKDYYNGGSFLTMLITPSTVVLAIPLYRTFHLMKHHIKSISISIILASVINTVFTAIVAKFFGMKYFLAISLFPKSVTTAMAVGITSKAGGLATITLVVVVITGILTSVLGPIFLKLLRIEDPVAIGLALGGTGHAIGTGQALKYGQVQGAMAGLAIGITGICYVIVSPLVAGLILK

SEQ ID NO: 10690 - protein, 272 aa, Glycine max
MGIVEEAHNVRIVGKGNEIVILAHGFGTDQSVWKHLVPHLVDDYQVILYDNMGAGTTNPDYFDFERYYTIDGFVYDLLAILQELQVQSCIFVGHSLSAMVGLLASISHPHLFTKLILVSASPRFLNDSEYFGGFQQEDLTQLYDGIRSNYKAWCSGFAPLVIGGDMDSVAVQEFSRTLFNMRPDIALSLAQTIFQFDMRPILCHVTVPCHIIQSTKDLAAPVVVAEYLQQNLGGKTIVEVMPTEGHLPQLSSPDIVVPVLLNHIRHNLAEDK

SEQ ID NO: 10691 - protein, 412 aa, Streptococcus mutans UA159
MKNYALLNGAYDNKTMYDFKPVRADNTYLYDSQNRKYLDLRSGLWNTSLGYIDSLYQRVSKRFDQVLNKKLPYLDIHSFQHDIYDEVAQKVLELTGHAFKRVLYTNSGSENTELALKIADYTNKKGENNRILAFKDSYHGTFFGGVSVSGIDQEINSSFYPKYGEVTFIDYPKSAEQEKNVLDYIANVASFYDVMMIEPILASAGIYFASTDFFNALLKLLRKNQVLIVFDEVATGFFKTGKPFYFQQLSEKPDILCLSKAINNGITSFGCVCVNEEVDAKLQKNPKTMEHFSTQNGNLLGLESANIVLDYYLKSRDVIKGKVKDISDSISNVLDSQNVFYRNQGIMTAIRTESNQSLQLMKSLEKLGILTYLYVNEEEEGLSIMPPININLNVLEKALKLISKKIESQNSF

SEQ ID NO: 10692 - protein, 163 aa, Oryza sativa
  unsure (1)..(163): unsure at all Xaa locations
IHRPFXDGAQPTRYXQEVFQXXIVKDXIQASNEFLRPKSQTCTNVEDLPSXLSPDICLVNFYTSSGKLGLHQDKDETKPSLHKGLPVVSFSLGDTAEFLYGDVNDVDKASKVDLESGDVLIFGGKSRLIFHGVSRIKPKTAPNWLTDEAKLRPGRLNLTFRQH

SEQ ID NO: 10693 - protein, 435 aa, Zea mays
MSQRDGDLTGAHPEEGDRHAVRMDGSDDDELDQPTSKATEHITAMDVRKGKDMQGIPWNVMPTTRDKYRQSRLQGYANFENVPNSGRLSEKECMPAEKGQLYYEFQHSTRSVKPTIRHFQLRNLVWATTRHDVYLMSNFSVLHWSAMTCKKQEVINLLGHVTPCEKHHRNYYEGFYRTPVSTLAVKHNLLVTGGFHGEIICKFLDRQGVSYCCKTTNDDDGITNSLEIFEKPSGSLHFLASNNDCGLRDFDMEKFRICNHFHFAWPVNHTSLSPDGKLAAIVGDSPDGLLIDANSGKTVHKLHGHLDYSFASAWNPDGRTFATGNQDKTCRVWDVRNLSRSVVVLGGNIGAVRSIRYTPDGKFMAMTEPADFIHIFDVESGYSRKQELDFFGEIAGISFSPDTEALFVGVHDRFFSCCLLQFNRRRFYSYLDSTL

SEQ ID NO: 10694 - protein, 159 aa, Tropheryma whipplei TW08/27
MQTLTAIVEIPRGSRSKYEIDKKTGRLFLDRVVSTAFGYPTNYGFIENTLALDGDPIDALILVQNQLFPGVALHIRPVGVLHMTDDGGEDDKVLCVALKDPYCDHINDLDDVPKHVLNQIEHFFQHYKDLEEGKWVKLGAWNGKDKAMEIITEGLSRFN

SEQ ID NO: 10695 - protein, 537 aa, Zea mays
  unsure (1)..(537): unsure at all Xaa locations
LNRHQSLPLNRGRKTPHPTPRPPPQTTPTFLTSPPTRRRRPTAGMPPAIPSLVHPSRVRILHPGGSHIHGPVVYWMLRDQRLADNWALLHAAELAAASTPAAPLAIAFTLFPRPFLLGAHLRQLGFLLRGLRRLAADAHARGLPFFLLEGGPAELPSLVRRLGASALVADFSPLRPVREALDAVVQELLRDAANMAVHQVDAHNVVPVWTASGKLEYSAKTFRSKVNKVINEYLVEYPEVPQWAPWCMEQPKSVDWDALINSIFSEAENVPEINWCEPGESSAMEVLLGSKDGFLTKRIKNYDTGRNDPTKPHALSCLSPYLHFGHISALWCALDVXIIRHQSTKSVDTFLEELIIRRELADNFCYYQPQYDSLAGTWEWARQTLTDQTSDIIEHWCTRGQLENAKTYNPLWNASQLEMVHHGKMHGFMRMYWAKKILEXNIQPEEALSIAIYLNDKYHIDGRDPNGYVGCMWSICGLHDQGWKERPVFGKIRYMNYAGCKRKFDVDAYISYVKRLVPRAKKRKTEEGESTVKESNV

SEQ ID NO: 10696 - protein, 297 aa, Nepenthes alata
DQFDDTDPREKIKKGSFFNWFYFSVNIGALISSSLIVWVQENLGWALGFGIPAISMGIAIASFFSGTALYRLQKPGGSPLTRMCQVLVASFRKSKLALPEDSNLLYETSDENSVIEGGRKLEHTNDLKCLDKAAVVSDKEIKCEDFSNPWRLCTVTQIEELKILIRMFPIWATGIVFSAIYAQMSTMFVEQGEVMDRTIGSFTIPAASLSMFDTISVIFWVPVYDKILVPLARKSTGKQRGFSELQRMGIGLFISILSMAAAALVEMKRLQLAKELGLVDEDVAVPLSIFWQIPPYF

SEQ ID NO: 10697 - protein, 358 aa, Glycine max
LRLRENDRRGPQNQTKQNPFPSTYTLLQSHPKKTCNKPKTMLDESVSSTPTFLGSLYSWFTPTVFFLLLQLVIGTIFIISNLANTHKHQQQEPQQAHDFPHHHLPRSPSMLQRLKSINFYPSSPFRSQDLQNPHFHNAHENEQPQLARSPSVLQRLKSINLYSYFPTEPFTSKLTPDQHVPEKPYVREQNQPQQVVETDEEKEEGYDDYVVEDDNNIIMSTHNYNYNLGVSEEGGAGSSSLDEIYCKLQQQGQEGHFERTHSDTKPASGEVPVKLPRKMKKSASSKSAFSHFKEDDIVETRRPATVREAKVTGGAAEDDAEVDAKADDFINKFKQQLKLQRLDSIIRYKEMIGRGSAK

SEQ ID NO: 10698 - protein, 189 aa, Zea mays
  unsure (1)..(189): unsure at all Xaa locations
PKWTPWCMEHPKDVDWDALINSIFREAENVPEIDWSEPREAEXMEDLIENNDGHWTNRIKSYDTSRNDPTKNTCIVVPVTILTLXHISAQKRAIHAKKHRHIIPNSVNTFLTDLIIMRELADNFCYYQXNYNSLTGAWEWAKKTFMDHAGDKREHICAREQHXHAKTSDPLWNASKLEMVHHGKMHGFM

SEQ ID NO: 10699 - protein, 165 aa, Glycine max
YVFPGYIFQMLTSLSWICWLYPNNVLAQQLGSGLNGLGIGAIGLDWSTISSYLGSPLASPWFATANVAVGFVFVMYVLTPLCYWLDLYNAKTFPIFSDELFTEKGQVYNITAIIDSNFHLDLAAYERQGRLYISTFFAMTYGVGFAALTATIMHVALFHGREIWE

SEQ ID NO: 10700 - protein, 510 aa, Gossypium hirsutum
MPSFDTILLRDLVAAACLFFITRYFIRRLLSNPKRTLPPGPKGWPIVGALPLLGSMPHVELAKLAKKYGPVMYLKMGTCNMVVASTPDAARAFLKTLDLNFSNRPSNAGATHIAYNSQDMVFAEYGPRWKLLRKLSNLHMLGGKALEDWSQVRAVELGHMLRAMCESSRKGEPVVVPEMLTYAMANMIGQVILSRRVFVTKGSESNEFKDMVVELMTSAGLFNIGDFIPSIAWMDLQGIEGEMKKLHNRWDVLLTKMMKEHEETAYERKGKPDFLDIIMDNRENSAGERLSLTNVKALLLNLFTAGTDTSSSIIEWALAEILKNPKILNKAHEEMDKVIGRNRRLEESDIPKLPYLQAICKETFRKHPSTPLNLPRVSTQACEINGYYIPKNTRLSVNIWAIGRDPDVWGNPLDFTPERFLSGRFAKIDPRGNDFELIPFGAGRRICAGTRMGIVLVEYILGTLLHSFDWMLPPGTGELNMDEAFGLALQKAVPLSAMVRPRLAPTAYVS

SEQ ID NO: 10701 - protein, 631 aa, Oryza sativa
  unsure (1)..(631): unsure at all Xaa locations
MEIIASISSTEFSIQCIPQLFSVGHMHIHLHQTIAKHAKNASHKESSGLIEFFLLISIKNAYRLASTHPEAFHSCQPQSGPDLPFLKVHTGTYPCNLSGLHAVFTHRIFRNVSNNKTNPNFPAAKQNCKRRLHLRKGEEPIFRTIQRDNRDNSVHDDRGGEDTCRCLEDESRLSRRGAPISIRRAEQGRGSCIVRDVRDSFGSLSRRSFEVSLSGLTGHHRGKSQSTVHELCDADLIIQESRWASLPPELLRDVIRRLEASESTWPSRKDVVSCAAVCKAWREMCKEIVLSPEFCGKLTFPLSLKQPGPRDGMIQCFIKRDKSKSTYHLYLCLSTAVLADSGKFLLSAKRHRKTTCTEYVISMDADNISRSSSTYIGKLRSNFLGTKFIIYDTQPSYNGAVIPPVGRSSRRFNSKKVSPKMPSGSYNIAQVTYELNVLGTRGPRRMHCVMHSIPASSVEPGGIVPGQPEQIVPRAFEESFRSXXTSFSKSSIMDRSMDFSSSRDFSSARFSDIAGGTINGDEEGQNKERPLVLRNKAPRWHEQLQCWCLNFRGRVTIASVKNFQLIAAPAQPPAGAPTPSQPAPXXEQDKIILQFGKVAKDMFTMDYRYPLSAFQAFAICLSSFDTKLACE

SEQ ID NO: 10702 - protein, 1129 aa, Avena sativa
MSSSRPASSSSSRNRQSSRARVLAQTTLDAELNAEYEESGDSFDYSKLVEAQRDGPPVQQGRSEKVIAYLQHIQKGKLIQTFGCMLALDEKSFNVIAFSENAPEMLTTVSHAVPSVDDPPRLGIGTNVRSLFSDQGATALHKALGFADVSLLNPILVQCKTSGKPFYAIVHRATGCLVVDFEPVKPTEFPATAAGALQSYKLAAKAISKIQSLPGGSMEVLCNTVVKEVFDLTGYDRVMAYKFHEDDHGEVFAEITKPGLEPYLGLHYPATDIPQAARFLFMKNKVRMICDCRARSIKVIEAEALPFDISLCGSALRAPHSCHLQYMENMNSIASLVMAVVVNENEEDDEAESEQPAQQQQKKKLWGLLVCHHESPRYVPFPLRYACEFLAQVFAVHVNREFELEKQLREKSILKMQTMLSDMLFREASPLTIVSGAPNIMDLVKCDGAALLYGGKVWRLRNAPTESQIHDIAFWLSDVHRDSTGLSTDSLHDAGYPGASALGDMICGMAVAKINSKDIIFWFRSHTAAEIRWGGAKHDSSDMDDSRRMHPRLSFKAFLEVVKMKSLPWTDYEMDAIHSLQLILRGTLNDASKPKREASLDNQIGDLKLDGLAELQAVTSEMVRLMETATVPILAVDGNGLVNGWNQKAAELTGLRVDDAIGRHILTLVEESSVPVVQRMLYLALQGKEEKEVRFEVKTHGPRRDDGPVILVVNACASRDLHDHVVGVCFVAQDMTVHKLVMDKFTRVEGDYKAIIHNPNPLIPPIFGADEFGWCSEWNAAMTKLTGWNRDEVLDKMLLGEVFDSSNASCPLKNKNAFVSLCVLINSALAGEETEKAPFGFFDRSGKYIECLLSANRKENEGGLITGVFCFIHVASHELQHALQVQQASEQTSLKRLKAFSYMRHAINNPLSGMLYSRKALKNTDLNEEQMKQIHVGDNCHHQINKILADLDQDSISEKSSCLDLEMAEFVFQDVVVAAVSQVLITCQGKGIRISCNLPERFMKQSVYGDGVRLQQILSDFLFISVKFSPVGGSVEISSKLTKNSIGENLHLIDLELRIKHQGLGVPAELMEQMFEEDNKEQSDEGLGLLVSRKLLRLMNGDVRHLREAGVSTFILTAELASAPTAIGQ

SEQ ID NO: 10703 - protein, 202 aa, Sulfolobus acidocaldarius
MKKETRKAVIANQDDLYALCIFRGKILEKIIFEENEKKLKESFENSPVKDEVKIFVDSGEEKDTCITIVKAIKRKVNKLVALNYYNARGDVMKFCPKCGSMMMPRKENGKTVYKCSKCAYIDTENQKEAKITTVIKHSAKAKTLVLASDMPNPGVQLTRGISCPSCGNDEAYFWILQTRSADEPATRFYKCTKCGKVWREYE

SEQ ID NO: 10704 - protein, 804 aa, Aspergillus niger
MAHSMSRPVAATAAALLALALPQALAQANTSYVDYNIEANPDLYPLCIETIPLSFPDCQNGPLRSHLICDETATPYDRAASLISLFTLDELIANTGNTGLGVSRLGLPAYQVWSEALHGLDRANFSDSGAYNWATSFPQPILTTAALNRTLIHQIASIISTQGRAFNNAGRYGLDVYAPNINTFRHPVWGRGQETPGEDVSLAAVYAYEYITGIQGPDPESNLKLAATAKHYAGYDIENWHNHSRLGNDMNITQQDLSEYYTPQFHVAARDAKVQSVMCAYNAVNGVPACADSYFLQTLLRDTFGFVDHGYVSSDCDAAYNIYNPHGYASSQAAAAAEAILAGTDIDCGTTYQWHLNESIAAGDLSRDDIEQGVIRLYTTLVQAGYFDSNTTKANNPYRDLSWSDVLETDAWNISYQAATQGIVLLKNSNNVLPLTEKAYPPSNTTVALIGPWANATTQLLGNYYGNAPYMISPRAAFEEAGYKVNFAEGTGISSTSTSGFAAALSAAQSADVIIYAGGIDNTLEAEALDRESIAWPGNQLDLIQKLASAAGKKPLIVLQMGGGQVDSSSLKNNTNVSALLWGGYPGQSGGFALRDIITGKKNPAGRLVTTQYPASYAEEFPATDMNLRPEGDNPGQTYKWYTGEAVYEFGHGLFYTTFAESSSNTTTKEVKLNIQDILSQTHEDLASITQLPVLNFTANIRNTGKLESDYTAMVFANTSDAGPAPYPKKWLVGWDRLGEVKVGETRELRVPVEVGSFARVNEDGDWVVFPGTFELALNLERKVRVKVVLEGEEEVVLKWPGKE

SEQ ID NO: 10705 - protein, 289 aa, Saccharomyces cerevisiae
LVHVASVEKGRSYEDFQKVYNAIALKLREDDEYDNYIGYGPVLVRLAWHISGTWDKHDNTGGSYGGTYRFKKEFNDPSNAGLQNGFKFLEPIHKEFPWISSGDLFSLGGVTAVQEMQGPKIPWRCGRVDTPEDTTPDNGRLPDADKDAGYVRTFFQRLNMNDREVVALMGAHALGKTHLKNSGYEGGGANNVFTNEFYLNLLNEDWKLEKNDANNEQWDSKSGYMMLPTDYSLIQDPKYLSIVKEYANDQDKFFKDFSKAFEKLLENGITFPKDAPSPFIFKTLEEQGL

SEQ ID NO: 10706 - protein, 432 aa, Nicotiana sp.
MAQILAPSGEWQMRMTKSSTDANPLTSKMWSSVVIKIIKELAVKSSAKFRVFALESDSGTVNQSEQLLNLDVTPYTDLIIAEYIWIGGSGIDMRSKSRTISKPVKHASELPKWNYDGSSTGQAPGEDSEVILYPQAIFKDPFRGGNNILVICDAYWPAGEPIPSNLRHKAAQIFSDSLVVSEVPWFEIEQEYTLLQQNVKWPLGWPVGGYPGTQGPYYLCAGADKSFGLDISDAHYKACLYAGINISGTNGEVMPGQWEFQVGPSVGIEAGDHIWCARYILERITGQAGVVLSLDPLPIEGDTNGAGCHTNYSTLSMREDGGFEVIKKANLNLSLRHLEHINAYGEGILEKLTGNHETASIDYFSWGVAFRGASIRVGADTEKQGKGYLEDRRPASNMDPYVVTGLLAQTTILWEPTLEAEALAAQKLALKV

SEQ ID NO: 10707 - protein, 214 aa, Paeonia californica
IVESVGEGVTDLKPGDHVLPVFTGECKECRHCKSEESNMCDLLRINTDRGVMLNDGKSRFSINGQPIFHFVGTSTFSEYTVVHVGCVAKINPEAPLDKVCVLSCGISTGLGATLNVAKPKKGSSVAIFGLGAVGLAAAEGARIAGASRIIGVDLNPERFEGAKKFGVTEFVNPKDYNKPVQEVIAEMTGGGVDRSVECTGSIMAMISAFECVHD

SEQ ID NO: 10708 - protein, 459 aa, Streptococcus pyogenes MGAS8232
MSIKEQTDNNELENGMVRGLENRHVQLIAIAGTIGTGLFLGAGRSIALTGPSIIFVYMITGAFMFMMMRAIGEMLYYDPDQHTFINFISKYIGPGWGYFSGLSYWISLIFIGMAEITAVGAYVQFWFPSWPAWLIQLVFLVLLSSINLIAVRVFGETEFWFAMIKILAILALIATAIFMVLTGFETHTGHASLSNIFDHFSMFPNGKLKFFMAFQMVFFAYQAIEFVGITTSETANPRKVLPKAIQEIPTRIVIFYVGALVSIMAIVPWHQLPVDESPFVMVFKLIGIKWAAALINFVVLTSAASALNSTLYSTGRHLYQIANETPNALTNRLKINTLSRQGVPSRAIIASAVVVGISALINILPGVADAFSLITASSSGVYIAIYALTMIAHWKYRQSKDFMADGYLMPKYKVTTPLTLAFFAFVFISLFLQESTYIGAIGATIWIIVFGIYSNVKFK

SEQ ID NO: 10709 - protein, 1619 aa, Neurospora crassa
MHGSTTAFMLFFSVLLTLASVRAAHNEVVTDDACLQIARSYEIWTKSGGHGDFSDIPGQTAYDCLMSMPFDSERAVKFLNEYLKYLQFQSTLDSLKHAPSGYKTPSIDLLKGFDKIRQRAEKSIYKSQYGFDNDIKSLIHRANEGHLEINLCSQQIFHFQRSPSLVSISSDGLELPKIYTWNDAKLLYSGFPNTQVSHLVEINSIDATYFLQAHLALTFQYHDPDARYNHLFPSPVNQYTGLLTGGGWQSYQGLWPGAAHYLLKFHNGTTMQVNTTVTWPATNGPMNYTDGQTLFKAACLPDYTPSLSSFSHSPIPPPPRQHLHNNPKDPPPSTEGIYPTPIIRTPQNSLRGYYLDNDTAVLQIPTFQHTAGITFSQTAQDFLTLAAEQDNKTKLILDLSGNPGGDVIPGLNIFKVLFPDLEIRTATRFRATEIVNLVGKVYSAVYKDTELREEEVPIDPPFMASVAVRPDQKTRFTGGWEEIFGPDEIPKGGGNMSRLLAHFDLELASTEVDPVFGYGPFKKSKTGRRPFKAEDIVVITNGECASTCALLISLLRRQGKVRTLVFGGRPRHAPMQAVGGVKGGQYWSLKTIYRHVSRAVELAMSKGTSTSTSTSTSTTCTILTEEELQRLKKLAPADPDPNPGAGFGTGEFPLRMGWKGEGGVNFRDLYYLDDDGDEENSEEEMGKDLSIGTVPAQFIYEPADCRRFFTVEMMFRPARMWEVAREVMFGSGSLVLRRYLRKKKKKKKKKKGGTWGRRGRLLYFRRWVAPVRGGLHEVVLVCKLYISPITQLPIVGGQSHVSSAGGVVVAPNFPFDNRDVGSSSLLAENLDEEENDDLVIYPSEPGSESDAFIKDNNRRSSSLASPLETDHGREDAEVGHLPSEDDEVIDPRLRNYPIPLVAKTVDLHNDETEPLLTIRFWILSTLWVIVGCSVSSVYYFKPYSVRLSGYVVQLLSWGMGALMARYFPQKQYTLTLPILRKEISFNLNPGPWNPKEHALVIVAYWGSTYTAYGLGPLSAMELYYHKRMSGPWAVLFLMTTQLMGYGFAGVYRDVLVRPPGMYYPGVLPNVTLFNAMHRHPSVTKKSLGFFGVVAAAAFVYQWLPGFVMPLLASLPVVCWMGLGTKTAFVLGSGTYGFGLLDFSLDWNYASFLTPLYTPLWATVNRFVGAAVVIWVVYPLAYFLNVNGAQQFAPMSSGTWDAEGNRYNISRILTPTYELNRTALEEYSPPYWSFSYAMHFFWGFAASTAVLTYAVMFHGRQSWEALRSSLQTISNPFAKKDHKQKKKNSQQHRAEFDDPYLKLTAHLPRVPHWWYLALLFSCLVIAIAQVSGGGMQLPWWGLLLITAISALFTFPSGILFGFTNVQIGMDYLSELLAGFLFPGKPIAVLTCTVYGRQILEQCLNLVSDIKFGFYMKIPERELFVAQVYGTLLGPFVNWACMRLIIDTQGPKLTGEVVSGTTWNALKTKNFFSLSVIWGVLGPQVFFGDESPYRWVYWGFVVGPLAVTLLWLVQHRLARPKWGKVASVVNPVVMLNGATLFPIYPTTNLATSALVAVVFMGYVYRYHPVWFRKYNYLLGAGLDCGAQLVQMAMILVVDLPNVTMPHWWGNDAVAVDKCYPI

SEQ ID NO: 10710 - protein, 198 aa, Triticum aestivum
  unsure (1)..(198): unsure at all Xaa locations
MSVPEAGQSAGRDEQEMDDYEQHQTRVLMALMQGLCAARYRKADNTPCLVDQGLYLGSVGAALNNEALKSLNITHILVVARSLNPAFPAEFTYKKIEVLDSPDTDLGKHFGECFTFIDEGICTGGNVLVHCFAGRSRSVTVVLAYLMKKXHQMSLQSAMSLVRSKRPQIAPNAGFISQLVNFEKSMQVEQGQRTLQSN

SEQ ID NO: 10711 - protein, 482 aa, Pseudomonas aeruginosa UCBPP-PA14
MSLEQTGHAPATSGVDFESVDADYFQHRQLKKGAAGWVLLVGLGVAYVISGDYAGWNFGLAQGGWGGMFLATLLMATMYLCMCFSLAELSSMIPTAGGGYGFARSAFGPWGGFLTGTAILIEYAIAPAAIACFIGAYCESLFGVGGWLIYLVFYIVFIGIHILGAGEALKLMFVITAVAAIALGVFIVAMVPHFDSANLFNIPQTAATGASSFLPFGYVGVWAAIPYAIWFFLAVEGVPLAAEETKNPKRDLPRGLIGAMLVLLAFAALILVVGPGAAGAKELMGSGNPLVEALESAYKGSTWMSQFVNLVGLAGLIASFFSIIYAYSRQIFALSRAGYLPRSLSLTNRKKAPVLALVVPGVIGFGLSLTGQGDLLILVAVFGATISYVLMMAAHITLRIRRPDMQRPYRTPGGILTSGVALALACVAVVAGFLVDPRVVVGAVAIYAVLIGYFALYSRHHLVSGTPEEEFAAIQAAEQDLR

SEQ ID NO: 10712 - protein, 578 aa, Houttuynia cordata
  unsure (1)..(578): unsure at all Xaa locations
SGKPFYAIVHRVTGSLIIDFEPVKPFEVPMTAAGALQSYKLAAKAISRLQSLPSGSMERLIDTMVQEVFELTGYDRVMAYKFHEDDHGEVISEVTIPHLDPYLGLHYPATDIPQAARFLFMKNKVRMICDCRAKPVKVYQDDKLSFDLTLCGSTLRAPHSCHLQYMENMGSIASLVMAVVVNEGGEEDRGGPADSSQQQLGRYRRKKLWGLVVCHNTRPRFVPFPLRYACEFLTQVFAIHVSKELELEETNSRKEILRTQTLLCDMLLRDAPMGIVNQTPNIMDLIKCDGAALFYKDKVFRLGIAPSETDIREIAQWLSAYHMDSTGLSTDSLHDAGYPKAAFLGDLVCGMAAVKITCSDMLFWFRTHTAAEIRWGGAKHDHSDRDDGKRMHPRSSFRAFLDVVKTRSLPWKDYEMDGIHSLQLILRTSVKEPEQVDSNKVIHAQLGDLKLDEMNELHAVTTEVVRLIETATVPILAVDVXGLINGWNAKISELTGMSLEQVMXKHLLTLVEDCSINVVRRMLCLALKGEEEQNIEFQVKTHGTRSDHGPVVLVVNACASRDVHGNVVGVCFVXQDVT

SEQ ID NO: 10713 - protein, 179 aa, Triticum aestivum
PSTGFQVEIVLVDYSGSHPPKQKPADGSADKKSDADSSTSSSAKDSNAAPVESKKETGSDDKDDVFSDNEAEDGSSKGRKEVSSSGQGGANGAKASETSVAQQEPSAVASGIEKITISGDQGIARAADAISLKTEASSKSGSTKAHPPAVESSSLSEFKAIAADASVFSFGDEDDYESE

SEQ ID NO: 10714 - protein, 841 aa, Brassica rapa
MKGVRNIYHHSYTFLLVFFVMILFRPAFSLSTLSSTESLTISSNRTLVSPGNIFELGFFRTNSRWYLGMWYKKLSGRTYVWVANRDNPLSNSIGTLKISNMNLVLLDHSNKSVWSTNLTRENVRSPVVAELLANGNFVVRDPSGFLWQSFDYPTDTLLPEMKLGYDLKTGLNRFLVSWRSSDDPSSGDFSYKLDIQRGLPEFYTFKDNTLVHRTGPWNGIRFSGIPEEQQLSYMVYNFTENSEEVAYTFLVTNNSIYSRLTINFSGFFERLTWTPSLVIWNPIWSSPASFQCDPYMICGPGSYCDVNTLPLCNCIQGFKPLNVQEWDMRDHTRGCIRRTRLSCRGDGFTRMKNMKLPETTMATVDRSIGVKECEKKCLSDCNCTAFANADIRDGGTGCVIWTGRLDDMRNYAVSGQDLYVRLAAADVVEKRTANGKIVSLIVGVCVLLLLIFFCLWKRKQRRAKAMATSIVHRQRKQILLMNGMTLSNNRQLSRENKTGEFELPLIELEAVVKSTENFSNCNKLGQGGFGIVYKGTLDGQEIAVKRLSKTSVQGADEFMNEVTLIARLQHINLVQILGCCIDADEKMLIYEYLENLSLDSYLFGKTRSSKLNWKERFDITNGIARGLLYLHQDSRFRIIHRDLKVSNILLDKNMIPKISDFGMARIFARDETEANTMRVVGTYGYMSPEYAMEGIFSEKSDVFSFGVIVLEIVTGKRNREFNNENNLLSYAWSNWKEGRALEIVDPDIVDSLSPLSSTFQPQEVLKCIQIGLLCVQELAEHRPTMSSVVWMLGSEATEIPQPKPPGYWVRRSSYELDPSSSKCDDDSWTVNQYTCSVIDAR

SEQ ID NO: 10715 - protein, 419 aa, Eruca vesicaria
YHYSYTLFFVILLQFHHVFSTNTLSSNETLTISSNKTLVSRGDVFELGFFKTTTKNSQDGTDRWYLGIWYKTTSERTYVWVANRDNPLHNSIGTLKISHNNLVLLNQFNTPVWSTNLTESVTSPVTAELLANGNFVLRDSKTKDLNRFMWQSFDFPVDTLLPEMKLSRNFKPGNDRILTSWKSPTDPSSGDFSFKLEPQNHGLHEFYLLKNEIEVYRTGPWNQNRFNGIPKIQNWSYIVNNFIDNNNEDVAYTFHVNNSNIHSRFRMSSTGYLQVITWTKTIPQRNMFWSFPEDACDLYQVCGSYAYCDINTTSNKCNCIKGFVPKNPEAWDLRDATGGCVRSSRLSCGEGDGFMRMSKMKLPETSEARVDKGIGLEECKERCVRDCDCTGFANMDILNGGSGCVMWIDELVDMRNYVA

SEQ ID NO: 10716 - protein, 180 aa, Pseudomonas aeruginosa PAO1
MTIRSYQGKTPLLGERVFVDPSAVLVGDIEIGADSSVWPLVVIRGDMHRIRIGQRSSIQDGSVLHITHAGPFNPDGFPLSIGDEVTVGHKVLLHGCSIGNRVLVGMGSIVMDGAVIEDEVILGAGSLVPPGKVLESGFLYVGSPAKKARPLSDKERGFFAYTAGNYVKLKDLHIAEDYHA

SEQ ID NO: 10717 - protein, 471 aa, Bacillus anthracis str. A2012
MANLFKKKSVTQLLGESKSKTLTKTLGAFDLTMLGIGAIIGTGVLVLTGLVAARDAGPAVIFSFMIAAIVCGFAALCYAEVASTLPVSGSVYTYSYATIGEFIAHLMGWTLLSVYVVTTAAVAGGWTGYFNNLVSGFGLEIPTELLKIPSQGGIVNLPAVVITLVLTWLLSRGTKESKRVNNIMVLIKIGIVILFIAVGAFYVQPENWTPFAPYGISGIFAGGAAVFFAFLGFDALATSAEEVKNPQRDLPIGIIASLVICTIIYVVVCLVMTGMVSYKELDVPEAMAYVLEVVGQDKVAGVIAVGAVIGIMAVIFAYIYATTRVFFAMSRDGLLPKSFAKINKKTEAPVFSTWLTGIGSALIAGFIDLKELSNLANIGALLTFAMVGVSVIILRKTHPNLKRGFMVPLVPTLPLISIACCLFLMFNLPLTTWIYFGIWLAIGVVVYFVYSKKHSHLKDDGSSQDNLEQAN

SEQ ID NO: 10718 - protein, 99 aa, Zea mays
  unsure (1)..(99): unsure at all Xaa locations
RSPWCRNKLEACPASREMARLPYAPAPAGCSPVRYTCRSSASAPTGSAFFLTAFSSFTYAMHQVCQGQLVRRALQEXEVAARTAILTMLPAEEDDRLVT

SEQ ID NO: 10719 - protein, 452 aa, Synechocystis sp. PCC 6803
MTVLTNSSSVPQLNRCLGLIQVTTQAIAVVGPTITAVINIPQVYLSSGNSSWLTYLIACLCILLVSQVLITFARQEAGTAGLATYVLQGLGVTFARLTGWLLLLAYGGFGILLLAMASQSFAILMGMAGPKLPLWFFVVVLGGLIWWLVSRDVRVSNGMMLVLESVSIIIIFWLCSVILFHHSIKFDLSEFQLTSATGNQVRSGLMIAFLSFVGFESAATLGRESLHPLKDIPKALRIATLLPGALFLVWAYVLGLGFKAAPSNILNSASPLVSLGDFLQIPTAAMVISFSASVCFLSASLGVFSALARVGLSLGKEKILPPFSTKIHPAFHTPVGSLTLGLGICILGTLVLLAMGLKPDDINDVCGTFGTLALLLVYGLVSISLLRDHYRRGILSRSILILGSVTILLLATATIAFLSGLNQGDLLNTVLIFFVLIVLGIGIIARQGADRS

SEQ ID NO: 10720 - protein, 262 aa, Streptomyces sp.
MSDAADRVALVTGGTSGIGLAVGRRKLALDGTRVFLCARDESAVTGTVKELQASGLEVEGTSCDVRSTDAVDRLVRTARNPLRAIDIVVNNAGRGGGGVTAQITDDLWSDVVDTNLGGAFRVTRAVLTGGGMQEHGWGRIINIASTGGKQGVALGAPYSASKSGLIGFTKAVALELARTGITVNAVCPGYVETPMAQGVRQRYAAFWGITEDDVLEKFRAKIPLGRYSTSDEVAGMVHYLVSDSADSITAQAINVCGGLGSY

SEQ ID NO: 10721 - protein, 464 aa, Salmonella enterica subsp. enterica serovar Typhi
MKNASTASGASVSDAASKNEPTLQRGLQNRHIQLIALGGAIGTGLFLGIGPAIQMAGPAVLLGYGVAGIIAFLIMRQLGEMVVEEPVSGSFAHFAWKYWGPFAGFLSGWNYWVMFVLVGMAELTAAGIYMQYWLPDVPTWVWAAVFFIIINAVNLVNVRLYGETEFWFALIKVLAIIGMIGFGLWLLFSGHGGEHASIDNLWRYNGFFATGWHGLLLSLAVIMFSFGGLELIGITAAEARDPQKSIPKAVNQVVYRILLFYIGSLVVLLALYPWVEVKSNSSPFVMIFHNLDSNVVASALNFVILVASLSVYNSGVYSNSRMLFGLSVQGNAPKFLTRVSHRGVPVNSLMLSGAITSLVVLINYLLPQKAFSLLMALVVATLLLNWIMICLAHLRFRAAMRRKGRETQFKALFYPAGNYLCIAFLALILVLMCTMDDMRLSAILLPVWIVFLFIAFTVLRRKAH

SEQ ID NO: 10722 - protein, 756 aa, Bacillus sp.
MENAARQASVRYAQNGQGPLLGYDESSGVRILRVDGHAFKDLNKDGKLDPYEDWRLPPEERARDLASKMTIEQIAGLMLYSSHQAIPGNMGWFPATYAGGKAFPDSGAAPSDLSDQQLDFLSNDHIRHILVTRVQSPEVAANWNNNVQAYAERLGLGIPANNSSDPRHGSDTSKEFNAGAGGAISMWPESMGLAATFDPAVAREFGEIASREYRALGLSTALSPQVDLATDPRWFRFGMTFGEDPRLATDMARAYIDGFQTSEGDAEIADGWGSDSVNAMVKHWPGGGSGEAGRDAHFGYGKYAVYPGNNFEEHLRPFTEGAFRLAGKTGEASAVMPYYTISVGQDPVNGENVGNAYNAYLIRDLLRGKYGYDGVVCTDWGITADEGPDIERLFPGGRCWGVEENHTVAQRHYKLLMAGVDQFGGNDDAGPVIEAYRIGVEAHGEPFMRARFEQSAVRLLKNMFRLGLFENPYLNPGKSAALVGNPAFMEAGYRAQLRSVVMLKNEGILPLPKRQTVYIPKRKLPADADWMGNPVPPSETYPINLDVVRKYFDVTDRPADADFALVCIESPRSTKGYSKADAEAGGNGYVPISLQYRPYTADHARETSLAGDPRDVLNRSYKGKTAAVANEGDLDAVLETKRLMNGKPVVVSIALSNPAVAAEFEPAADAILAHFGVQDQAILDILTGAFEPQALLPFRMPADMTTVEKQLEDVPHDMDVYVDSAGHAYDFAFGLNWSGVIADARTSRYANKRRTL

SEQ ID NO: 10723 - protein, 151 aa, Dendrobium sp. XMW-2002-9
MEEDGILINYIANHGEGVWNNLAKSAGLKRTGKSCRLRWLNYLRPDVRRGNITPEEQLLIMELHARWGNRWSKIARQLPGRTDNEIKNYWRTRIQKKVKNGDAVDYSSQMIIDEACTSHTSSIEEGMAQQNYPVHPNTNPEGYRLQTTRVN

SEQ ID NO: 10724 - protein, 303 aa, Agrobacterium tumefaciens str. C58 (U. Washington)
MRTAWLRTDRKRKDVDMAQQNAEHIADWRGQSGERWAAYQARLDAMMAPFGQAAIEAAAPTTGERVLDVGCGAGASSRDLAARVGAEGHVLGVDISEPLIERARALAPQDMSVVFRVTDASRAELPDGAFDILFSRFGVMFFNDPTGAFAHMRRALKPGGRAAFVCWRGVTENDWMRLPMGAMKGILPSMTPPGPEAPGPFSFGDQERVERILTKAGFTDIAIEPFDASVSFGEGATRDAALDDAVNMTLEVGPLSRVLADQPDDIRDRASVAVRAALSGCPGERSVMINGATWIVTARNPAS

SEQ ID NO: 10725 - protein, 646 aa, Candida albicans
MTSLQQQQQQQRVKYGPPHHIKRRPYHPILESLEFQTNQHLIQEYSLDIVNTLSQLESLTLVNPAMIDLQPEIQWFMRPFLLDFLIELHSSFKLQPTTLFLCLNIIDRYCAKRIVFKRHYQLVGCTALWIASKYEDKKSRVPTLKELTIMCRNAYDEEMFVQMEMHILSTLDWSIGHPTLEDCLQLAIDSNNLSNNTTNDIENKSVRPNRKSSISSAVTAVARFLCELSLYDKYFLSVPPSLIAITANLLSCSMLQIPHASITLKNLIEQEIINPQQKKQKKAFSSNSSRTTTASYTHQNQSDVRHSSFDEDIDLDSGDEGDDDEDYIDEFYETNNYDDTNATTFDESINKSTTINDENQPPQIHTPFLSGLDEDSILSIKKICLMLIIQLSKVTEVLSKKYENLGVIQVINNFHSNYKFIIQSIYENQELLLNTINDSTNNNEIDYKLIQSSEILLQFPKFDEYLTEDEDENVSTDDEANSQPQGYDGSGSDGNNQLFTPKSPNAFSSNSSLTLNNHPQSMVPVTPPSATSQYSLFSNKNNRTHESTSGLNSTCNTPTHISISSFAPPQPPPGSILKPKLTSINSTNSLKIKKLTSNSNSSNINIHHGHHNTKQEKRYSHISIGSNSSSKYDGFSPIKSISTNGS

SEQ ID NO: 10726 - protein, 181 aa, Triticum aestivum
MMAETEAASAAAAAEAGPAEEGTTNKTVVLVGVDDSDHSYRALEWAVRYVAETAGAGAPVELVVVHAKPAVSSVVTLGGPAAAGDVVRYVDADLRRRAEEVVDRARRLCAANSVQGVVEVIDGEPRFVLCNAVEKHHADLLVVGSHGYGAIKRAFLGSVSDYCAHHAHCSVMIVKQPKPKE

SEQ ID NO: 10727 - protein, 335 aa, Thermoplasma volcanium
MKAAILKKINEPVSIDDVDIPDPAENEVLIKQEYAGVCYRDLLAATGFFPRIALPMIQGHEIGGTVVKVGDKVEAFRPGDKVSSLIYIPCGKCEFCRSGNENLCPYKKSLGEEVQGGFRQYVNIPEISLVKAPNNVDGASLSLAACVTGMLYHALKRMGKAGEGKKVLITGAGGGVGIHAVEMAKAFGATVIAETTSPEKLDLLEKIGADYIVDGNSKFNEDVKKLGGADIVLECVGIYTFERSLRSLNNGGKMVIIGNVKPDPVSLPLGLIILKGNTIRGSISSTKKDVEEALNMVSKGMIKPIVGKEIDISQINEAYKLMKDKKSSGRIMIKF

SEQ ID NO: 10728 - protein, 173 aa, Oryza sativa
  unsure (1)..(173): unsure at all Xaa locations
ARGQSVRSSPCTPXRRAAISRRRAARPPRRRRRRLRSTWARRAWTLAGSAAVLSSLSTSAIAAADADAIAAPLAAALAAYSLADLATGVYHWLVDNYGDADTPVLGPQIAAFQGHHRHPSTITRREPCNNLHALARAVALALPPSGAALAAAGAPASAHAFAAVFAACVVLSQ

SEQ ID NO: 10729 - protein, 348 aa, Streptomyces coelicolor A3(2)
MNHVADPSRYDGSMHYRRTGRSGLDLPALSLGYWHNFGDDKPFETQRRIALRAFDLGITHHDLANNYGPPYGSAEINFGRIMRQDLAPYRDELVVSTKAGWDMWPGPYGQGGGSRKYVLASLDQSLKRTGLDYVDIFYSHRLDASTPLEETMTALDTAVRQGKALYVGISSYDAERSRQAAAILRDLGTPLLIHQPSYNMLNRWIETEGLLDAAADEGFGVIGFTALAQGLLTGRYLDGVPEGSRATQGKSFATGWLTDDTVRRLRALNDIAARRGQSLAQMALAWALRDPRVTSLVIGASRPEQLEENVAALANPSFDDDELAEIDEYAVVDGDVDLWRRARTGDLG

SEQ ID NO: 10730 - protein, 154 aa, Schizosaccharomyces pombe
MVRAVAVLRGDSKVSGVVTFEQVDQNSQVSVIVDLVGNDANAKRGFHIHQFGDNTNGCTSAGPHFNPEGKTHGDRTAAVRHVGDLGNLESDAQGNIKTTFSDSVISLFGANSIIGRTIVIHAGEDDLGKGTSEESLKTGNAGARNACGVIGIAV

SEQ ID NO: 10731 - protein, 66 aa, Glycine max
  unsure (1)..(66): unsure at all Xaa locations
EEYDTHDPKGPSSMVLPFLXKRSKIIEIVAARDIXXALAQSGVCAAFSRGSIVVQLFDAETNQRIC

SEQ ID NO: 10732 - protein, 141 aa, Oryza sativa
  unsure (1)..(141): unsure at all Xaa locations
XKNXFVXMGXXFXVQDXXXXCXXDXEFFGXIXRPXXNXXCXWFVXQXXEXAXENXXPXFFXNXXKPXPXXXXKMXXXXKKLYXEAVFXXFXXXXFHXXXXXXEXPXNKXVXNXFKSXXPXIFQRXXXXLAXGXTVXCLLXN

SEQ ID NO: 10733 - protein, 476 aa, Lycopersicon esculentum
FYNFSKKLQGMAKTNGFMGHDMLAPFTAAWMIDMGPLVIDKAEGSYVYDVNGKKYLDSLSGLWCSVLGGSEPRLIEAANKQLNKLAFYHSFWNRTTKPSLDLAKELINMFTANKMGKVFFTSSGSEANDTQVKLVWYYNNAIGRPNKKKIISRKNAYHGSTYMTAGLSGLPSLHLKFDLPPPYILHTDCPHYWNYHLPGETEEEYSTRLANNLENLILKEGPETVAAFIAEPVMGGAGVIIPPATYFEKIQAVLKKYDILFIADEVICGFGRLGTMFGCDKYNIKPDLVSIAKALSGGYIPIGAVLVSEEISKVIMSQSNQLGVFCHGFTYSGHPVACAVALEALKIYKEKNITEVVNKLSPKFQEGLKAFIDSPIIGEIRGTGLVLSTEFVDNKSPNDPFPPEWGVGTYFGSQCQKHGMLVSFSGDHVNMAPPFTLSLEELDEMISIYGKALKDTEKKKKKKKKKKKKKKKKKKK

SEQ ID NO: 10734 - protein, 331 aa, Lycopersicon esculentum
MGHHSCCNQQKVKRGLWSPEEDEKLIRYITSHGYGCWSEVPEKAGLQRCGKSCRLRWINYLRPDIRRGRFTPEEEKLIISLHGAVGNRWAHIASHLPGRTDNEIKNYWNSWIKKKLKKTSKSSTNTTSITDHHHHQHQNQRPQLTNYNTITSQQDIFFTQDIGTKSQVLLQDSTLFNSPNQLFFFDGGSLDSMTNVLINDATNRNATNNTSLFQETSILNSEFCWQVDQQQVQTSSYAIGMNSNYLPPLIESMVPPMEIPSSNNNNNIILEGQENNNELNEWNSQVDTQQCCPSYLFWDQENGSIGGDHEIIDPTTSNNMGQILSSFPSTL

SEQ ID NO: 10735 - protein, 248 aa, Burkholderia fungorum
MPAHLPNLNDRVALVTGGSRGIGRAISIALAAAGASVAVNYRQRGNEAAGVVAEIERAGGRAIAVRADVSVADDVKAMFREVENHLGLIDVLVNNAGTGTIVDIDDLTEAEFDRTLAVNLKSAFLCTQAALPGMRARHWGRIVNLSSAAARGAGLLGVHYNASKAGVEGLTRGYAAKLAREGITVNAVAPGPIDTEMAGPLKAANVADKLPVGRLGEASEVAQAVLMVVGNAFITGQTIPVNGGVSFI

SEQ ID NO: 10736 - protein, 153 aa, Nicotiana benthamiana
MKMIVLRSSDGETFEVEESVALESQTIKHMIEDDCADTSIPLPNVTSKILAKVIEYCKRHVDAASKTEDKAVEDDLKAFDADFVKVDQSTLFDLILAANYLNIKRLLDLTCQTVADMIKGKTPEEIRKTFNIKNDFTPEEEEEVRRENAWAFE

SEQ ID NO: 10737 - protein, 250 aa, Triticum aestivum
  unsure (1)..(250): unsure at all Xaa locations
EVLKSAGVSSNPQESTANAEPEISAAEKQELQNKMAKLLAMLDEVDRKYKHYFHQMQIVVSAFDMIAGSGAAKPYTAVALQTISRHFRCLKDAINDQVNVIRKKLGEEDSSSGREGMLTRLRYIVQQLRQQRAFQQXGMLQQNAWRPQRGLPXNSVSILRLXLXFEHFLHPYPKDSEKLMXARQTGLTRSQISNWFINARVRLWKPMIEDMYKEEXXEAELDSNSXSDNLPRSKDKRPSCEDREDLKWLM

SEQ ID NO: 10738 - protein, 212 aa, Sphaceloma manihoticola
GGKCNRGMSVVDTSSFLLGRPLSKDEYFKSATLGWMIELLQAFFLVSDDIMDSSKTRRGSPCWYLMPQVGMVAINDAFMLETSIYLLLKKYFRQSKHYVDLIELFHEVSFQTEMGQQCDLLTAPEDKVDLDNFSLEKYSFIVIYKTAFYSFYLPVALALYYCELATEKNLKQAKDILIPMGEYFQVQDDYLDNYADPETLGKIGTDIQGNKC

SEQ ID NO: 10739 - protein, 470 aa, Escherichia coli O157:H7 EDL933
MVDQVKVVADDQAPAEQSLRRNLTNRHIQLIAIGGAIGTGLFMGSGKTISLAGPSIIFVYMIIGFMLFFVMRAMGELLLSNLEYKSFSDFASDLLGPWAGYFTGWTYWFCWVVTGMADVVAITAYAQFWFPDLSDWVASLAVIVLLLTLNLATVKMFGEMEFWFAMIKIVAIVSLIVVGLVMVAMHFQSPTGVEASFAHLWNDGGWFPKGLSGFFAGFQIAVFAFVGIELVGTTAAETKDPEKSLPRAINSIPIRIIMFYVFALIVIMSVTPWSSVVPEKSPFVELFVLVGLPAAASVINFVVLTSAASSANSGVFSTSRMLFGLAQEGVAPKAFAKLSKRAVPAKGLTFSCICLLGGVVMLYVNPSVIGAFTMITTVSAILFMFVWTIILCSYLVYRKQRPHLHEKSIYKMPLGKLMCWVCMAFFVFVVVLLTLEDDTRQALLVTPLWFIALGLGWLFIGKKRAAELRK

SEQ ID NO: 10740 - protein, 185 aa, Glycine max
  unsure (1)..(185): unsure at all Xaa locations
MEGGGRRITVSPRPCCGRRVVAKKRPRLVDGFVNSVKKLQRREISSNRDRAFSMTDAQERFRNIRLQEEYDTHDPKGPSSAVLQFLRKRSKIIEIVAARDIGFALAQSGVCAAFSRETNERICFLNGKSLMKVXRSLFYXNXNNDSLITVSVYASDDYSSVKWRSTRIEYIMRAYPGSGFALLES

SEQ ID NO: 10741 - protein, 197 aa, Raphanus sativus
MGRKKLEIKRIEKKSSRQVTFSKRRSGLIEKARQLSVLCDASVALLVVSSSGKLYSFSSGDNLVRILHRYEKQHADDLKALLDLQSKSLSYGSHNELLELVESKLVESNVGVSVDALVQLEGHLETALSLTRARKTELMLKLVDSLKEKEKLLKEENKVLASQMEKNNLAGAEADNMEIARAQISDINLPVTLPLLN

SEQ ID NO: 10742 - protein, 135 aa, Youngia japonica
TSLCLMTSWTSLIHAEVSPVGSDSKVGMIAANDGIILRNHVPRILKKHFRGKPYYIDLVDLFNEVEFQTASGQMIDLITTLVGEKDLSKYSLSIHRRIVQYKTAYYSFYLPVACALLMFGEDLEKHVEVKDVLVE

SEQ ID NO: 10743 - protein, 168 aa, Triticum aestivum
  unsure (1)..(168): unsure at all Xaa locations
ELAHRVDDALGFMTASGLTVDHPIMTTTDFWTSHECLLLPYEQALTREDSTSGLFYDCSAHMLWVGERTRQLDGAHVEFLRGVANPLXGIKVSDKMNPXELVXLIDILNPSNKPXXITIITRMGAEXEVKLXQLIPAVRNAGXCTWITDPMXGTQQSPCGLKSFYPSG

SEQ ID NO: 10744 - protein, 152 aa, Oryza sativa
MVKAVVVLGSSEIVKGTIHFVQEGDGPTTVTGSVSGLKPGLHGFHIHALGDTTNGCISTGPHYNPAGKEHGAPEDETRHAGDLGNVTAGEDGVANIHVVDSQIPLTGPNSIIGRAVVVHADPDDLGKGGHELSKTTGNAGGRVACGIIGLQG

SEQ ID NO: 10745 - protein, 545 aa, Staphylococcus aureus subsp. aureus Mu50
MNKDKQLHNDKINLSQLVLLGLGSLIGSGWLFGAWEASSIAGPVAIISWVLGFLVIGTIAYNYIEIGTMFPQSGGMSNYAQYTHGSLLGFIAAWANWVSLVTIIPIEAVSAVQYMSSWPWHWAKPMRYLMENGSISTYGLLAVYLIIVIFSLLNYWSVKLLTSFTSLISVFKLGVPMLTIIMLMLSGFDTSNYGHSASTFMPYGSAPIFAATTASGIIFSFNSFQTIINMGSEIKNPEKNIARGIAISLSISAVLYIILQSTFITSMPQSMLQHSGWNGINFNSPFADLAILLGINWLAILLYIEAFVSPFGTGVSFVAVTGRVLRAMEKNGHIPKFLGKMNEKYHIPRVAIIFNAIISMIMVTLFRDWGTLAAVISTATLVAYLTGPTTVIALRKMGPTMTRPFRAKILKVMAPLSFVLASLAIYWAMWPTTAEVILIIILGLPIYFFYEYRMNWRNTKKQIGGSLWIIVYLIVLSILSFIGSKEFKGLNMIHYPFDFIVIIVVALIFYYIGTTSSFESVYFRRATRINTKMRESLNNESKSSH

SEQ ID NO: 10746 - protein, 125 aa, Triticum aestivum
  unsure (1)..(125): unsure at all Xaa locations
YFHLPIREASRTXKIGLSIXKKKCRQYGIPRWPHRKLKSLDSXIHDLEYVIXDETERDGVKQEDHMQDEKENQDAIEALAKRKRMLETEKATIQQKPTLDLMAETKQFRQYVFKRKYRAKTLVSE

SEQ ID NO: 10747 - protein, 380 aa, Cucurbita maxima
MNPEVLSTDENDKLATRKTEKEQNDAPNSKEKLKKPDKILPCPRCNSMETKFCYYNNYNVNQPRHFCKACQRYWTEGGTIRNVPVGAGRRKNKNSASHYRHITISEALRAAQIDVPIEVNHLASKGNGRVLNFSVSPPVCESMVNVSHPAERKVLNGTRNEFEGAKGPCEGGETGDDCSSASSVTMSSSMKNGARRFPQEPHMQNINGFPSQIPCLPGVPWPCSWTAPIPPPALCPPGVPLSFYPATYWSCSASGSWNIPWVTPQPCPPIPGPNSPTLGKHSRDGDELQADNSEMKDPPKQKNGSVLVPKTLRIDDPNEAAKSSIWETLGIKNDSIKAVDLSNVFQSKGDLKSNVSEVLSPVLQANPAALSRSLTFHERS

SEQ ID NO: 10748 - protein, 297 aa, Rhizobium sp. CIAM2026
  unsure (1)..(297): unsure at all Xaa locations
RGKTQVKEFAEFPTLEELPLWGFDGSSTMQAEGHSSDCVLKPVAAYPDPTRTNGVLVMCEVMMPDGVTPHASNKRATILDDXGAWFGFEQXYFFYKDGRPLGFPETGYPAPQGPYYTGVGYKNVGDVARQIVEDHLDLCLAAGINHEGINAEVAKGQWEFQIFGKGSKKAADQMWIARYLLLRLTEKYRIDIEFHCKPLGDTDWNGSGMHANFSTAYMREVGGKAYFESLMAQFDKNLMDHIAVYGPDNDKRLTGKHETAPWNKFSYGIADRGASIRVPHSFVKNDYKGYLEDRRPN

SEQ ID NO: 10749 - protein, 111 aa, Petunia x hybrida
TDEELVVHYLKKKAASAPLPVNIIAEVDLYKFDPWELPSKANFGEQEWYFFSPRDRKYPNGARPNRAATSGYWKATGTDKPIFTCNVTRKVGVKKALVFYRGKPPKGIKTN

SEQ ID NO: 10750 - protein, 296 aa, Glycine max
MGFFVAHVVQGSALALLGLWHTIHTIRSYLVKGPANFTVRFWYQFNTTPQSRLKHLELVSILSFSILAFFDQILDFPHFHYAFKLDNFEHATMFIHLALFAGFSLSTELTDSLDLFSGFVGILASSVFSQELFLLHFHSTDHVGLEGHYHWLLQLIVLVSLVSSLAATIFPNNFNAALVLSISLIFQGCWFINMGFMLWIPSFVPEGCAVNLAKPSGHEIIGAVTCSSKEADFRARGLANLQFSWILSSILIFAGIICLKLSRKCTITTNRLEYERIQTKGATDSALANEGFKQAI

SEQ ID NO: 10751 - protein, 343 aa, Xylella fastidiosa Dixon
MKINSNLFDCLLPIVAAPMAGGPTTVALAQAVSGVGGFPFLAGGYKSVEALATEIAVLRASGGDFGVNLFVPSPDMVDAEAFSIYAAKLQSEALPYGLRLDPLPVMGDDDGWPDKLALLLNDPVPVVSFTFGLPAVRDIAALRCAGSRVLASVTLPAEAQAAMEAGVDGLVVQGPDAGGHSATYDPGRPFTPLKTVSLVRRVCAVSSLPVIAAGGVDGPVMVRALLQAGAAAVAIGTLLLRTKESGATQVHKDALANPAYTETAITHAFTGRPARTLRNGFVNRYHASAPLGYPAIHHLTRPLRQAAASAGDADVLHLWAGTGYRQAMDGSAVDVIRYLAAGL

SEQ ID NO: 10752 - protein, 349 aa, Prochlorococcus marinus subsp. pastoris str. CCMP1378
MKILITGGCGFLGSNLSNFFLKKNYEVFIIDSLVRRGSDINLSWLKNSTNHKNLKNFQIDIKNKNKLENIFEVNGPFDYICHVAGQVAMTTSLKDPRTDLETNLIGTFNVLEAMRKYSPHSLLAYSSTNKVYGDLGWLNYKEMSTRFSVSEYPEGFNENLPLDFSTPYGCSKGSADQYVRDWARIYGLKTVVFRHSSIYGGRQYASKDQGWIGWFCKKAIEQKKQQKSNQKLLPFTISGSGKQVRDVLHADDLVNLYEKAFFAKEKLNGEIFNIGGGLENSLSLLELFNLLSELLDIEQLSYNKLPRRQSDQDFFVASIKKAKIKLGWEPKINYKKGIKDMISWTSTLI

SEQ ID NO: 10753 - protein, 369 aa, Trichodesmium erythraeum IMS101
MEIKAAVAFEAGKPLTIETINLEGPKAGEVMVEIKATGVCHTDAYTLSGADPEGLFPSILGHEGAGVVVEVGHGVTHLKPGDHVIPLYVPECRQCEYCLSMKTNLCQAIRTTQGRGVMPNGTSRFSLNGEIIHHYMGTSTFANYTVLPEISLAKIRKDAPFDKVCYIGCGVTTGIGAVINTAKVEVGAKVIVFGLGGIGLNVIQGAKMVGADMIVGVDINPAKQELAKKFGMTHFVNPKEVEGDLVPYLVDLTKGGADYTFECIGNINVMRQALECCHKGWGMSVIIGVAGAGEEISTRPFQLVTGRVWKGSAFGGAKGRTDVPKIVDWYMEGKINIDDLITNVMPLEKINEAFDLMHEGKSIRSVVTF

SEQ ID NO: 10754 - protein, 260 aa, Schizosaccharomyces pombe
MLEARFQQAALLKKLLDAIKELVTDANFDCNDNGISLQAMDSSHVALVSMLIKSDGFEPYRCDRNIALGINLNALSKVLRCAQNEDLVTLKAEDTPEVLNLVFESEKNDRISDYDVKLMDIDQEHLGIPDIEYDATITMPAAEFQRITRDLLTLSDSVTINASKEGVRFSCKGDIGNGSTTLKQHTDLSDQDQSIEISLTQAVTLTFSLKYLAQFTKATPLATRVTLSMSNDVPLLVEYKMESGFLRFYLAPKIGEEDEE

SEQ ID NO: 10755 - protein, 360 aa, Physcomitrella patens
MSPSVDCLASLYCAEDVSGTAWNESEMCGAADRVFESQPAVFMDFPVEDDEAIATLLMKEAQFMPEADYLERYQSRKLSLEARLAAIEWILKVHSFYNYSPLTVALAVNYMDRFLSRYYFPEGKEWMLQLLSVACISLAAKMEESDVPILLDFQVEQEEHIFEAHTIQRMELLVLSTLEWRMSGVTPFSYVDYFFHKLGVSDLLLRALLSRVSEIILKSIRVTTSLQYLPSVVAAASIICALEEVTTIRTGDLLRTFNELLVNVESVKDCYIDMRQSEIGPYCVRMGLKRKILHASEPQSPVGVLEAADVSSPSGTVLGFSSRESSPDVTDSPPSTNSQRKRRKLCLHNESCLHVESASL

SEQ ID NO: 10756 - protein, 123 aa, Glycine max
  unsure (1)..(123): unsure at all Xaa locations
MGWKGVLGFDYGVVQAPLGPDISGPELAAAVANAGAIGLLRLPDXPAPDHVRGLIQRTRSLTEKSFGAAIVLAFPHEENLRVVLEEKLAVLQVYWGEFPKERVDEAHRAGXKVLHQVGNXRRQ

SEQ ID NO: 10757 - protein, 307 aa, Zea mays
MPIISSHNSMPCPSSSSHLIPSRRIKSPSTLLPSPPGRCYCAGVHGTSGRTRYACILSTDQLGSKYAVSLGLGYDLSVFRLPPGVKKVLHPIISCALCADFAALAYGYISGFGLDAVLGAYLTKVPSNPGAGDVLMTFLGSVIISFAFSIFKQRKLVKRHATEIFTSIAIASTFSLYSTAIIGRLIGLEPSLTISILPRCITLALALSIVSFFEGVNSSVTAVVVVLTGLIGANFVLAAMEKLGLNDPISRGVGTASSAQGLGTAALAAKEPEALPFCAIAYSFTGIFGTLICSVPAVRQSLIFIAG

SEQ ID NO: 10758 - protein, 506 aa, Oryza sativa (japonica cultivar-group)
MPPTSVSPPRTAPGPANPSPAHPSRVRVIHPGGGKPGGPVVYWMLRDQRLADNWALLHAAGLAAASASPLAVAFALFPRPFLLSARRRQLGFLLRGLRRLAADAAARHLPFFLFTGGPAEIPALVQRLGASTLVADFSPLRPVREALDAVVGDLRREAPGVAVHQVDAHNVVPVWTASAKMEYSAKTFRGKVSKVMDEYLVEFPELPAVVPWDREQPEGVDWDALIARVCSEAENVPEIDWCEPGEEAAIEALLGSKDGFLTKRIKSYETDRNDPTKPRALSGLSPYLHFGHISAQRCALEAKKCRHLSPKSVDAFLEELVVRRELADNFCYYQPQYDSLSGAWEWARKTLMDHAADKREHIYTREQLENAKTHDPLWNASQLEMVHHGEMHGFMRMYWAKKILEWTSGPEEALSTAIYLNDKYEIDGRDPSGYVGCMWSICGLHDQGWKERPVFGKIRYMNYAGCKRKFDVDAYISYVKRLAGQSKKRNAEESPNPVVKLSKSQH

SEQ ID NO: 10759 - protein, 309 aa, Oryza sativa (japonica cultivar-group)
MGSFKGHVLPGTLFLAVGAWHVWAAAARFAADPRGFRLRAWNPVDVGGGGAPAWLPAHLELYVIAGGAFLDMCVEVLYSTHLHIFADGGINPAHLNDLEHGGMLLMFFLFGILALLSQKTRYLPLPEGALCLVASTAFMAELLLFYFHSTTHQGLEGYYHYLLVVVVALCVATTVLGALLPASFPVDIASGAAIALQGLWFYQTAFTLYGPSLPAGCRRDADGHIDCHTHAAQERAEQLANFQLFGLVFLVCAYALGCFAVAAARHGHPDLATMHAKHVAAMEAQLAGAGAGEGDRFVGSALPLEDTAI

SEQ ID NO: 10760 - protein, 312 aa, Oryza sativa
  unsure (1)..(312): unsure at all Xaa locations
XRERELVSSKATGKGDAASDGGPTTGTPLPDKKLLLFILDRLQKKDTYGVFSEPVDHEELPDYHEIIERPMDFSTIREKLLNDSYTTLEQFENDVFLLTSNAMSYNSDDTVYYRQARSIEALAKKDFENLRQASEPEEEQQPKTVPRRGRPPKYAKKIEKTENDVSPDLSNAKTKSADHAETIRKRLTGDRTRNANITTRDSPFLQHNTPGSFAGKRTDRFGDYSGPSKYGKKTTPTISDDERRSTYDQQYFHSSPLFSALGGERKVLVPVGLQQQHAYARSLARFAAKFGPVGWDIAAKRIRRLLPSGTNF

SEQ ID NO: 10761 - protein, 654 aa, Zea mays
  unsure (1)..(654): unsure at all Xaa locations
MISCHAENLRAVGRKHLPVGCATVRMRCGWRWPDRKKKPHGEPQNCAGPGIPHSDPGPCRAHHLPSLPTGRSRSSVAEETPCTARLLPIYRYLSTYPSSTPRSQIAMALATNSAAAAAAVSGGVASQPRRAAVFLPLKRRTISAIHAADPSKNNGPAVPAARRRXSSASAVATPEKKPAAHGKWAVYSWRSKKALQXLPEYPNAEELDAVLKTIETFPPVVFXAGEARRLEERMAEAAMGRAFVLQGGDCAXESFKEFHANNIRDTFRVLLQMGVVLMFGGQMPVVKVGRMAGQFAKPRSEPFEEKDGVKLPSYRGDNVNGDDFTEKSRVPDPAEDDPRPTAQSVATLNLXLRAFATXGGYAAMQRVTQWNLDFMDHNEQGDRYRELAHRVDDALGFMTASGLTVDHPIMTTTDFWTSHEXCLLLPYEQALTREDSTSGLFYDCSAHMLXWVGERTXRQLDGAHVEFLRGVANPLGIKVSDKMNPSELVKLIDILNPSNKPGRITIITRMGAENMRVKLPHLIRAVRNAGLIVTWITDPMHGNTIKAPCGLKTRPFDSILXAEVRAFFDVHDQEGSHPGGXHLEMTGQNVTECIGGSRTVTFDDLSDRYHTHCDPRLNASXQSLELAFIIAERLRKRRMRSGLNSSLPLPPLAF

SEQ ID NO: 10762 - protein, 144 aa, Gossypium turneri
LGTSTFSEYTVVHVGQVAKINPEAPLDKVCVLSCGMSTGFGATVNVAKPKKGGSVAVFGLGVVGLAAAEGARVCEASRIIGIDLNPNRFEEAKKFGCTEFVNPKDHNKPVQEVIAEMTGGGVDCSIECTGSTQAMVSAFESVHD

SEQ ID NO: 10763 - protein, 316 aa, Hordeum vulgare
MEGLQRSSSTFRRKKRPRRSRDGPNSVSETIKQWKEVKQQLEHDPQGAKRARKPPAKGSKKGCMQGKGGPENTQCGFRGVRQRTWGKWVAEIRESNRVSRLWLGTFPTAEVAAQAYDEAAKAMYGPLARTNFPVQDAQAAPTVVVQVATEGVVRGSSASCESTTTSNHSDVASSSHNKQLQIQAPEISSQSDLLESTQSVEYIQQQSVPDAVSSIAMSTSEEDVYEPLEPISNLPDGEAHCAISRCFGPRTWPETWTRRRRGCPAASSTPSSGVPAPALAPQRAEAVPSPRGGNGRRCRGSDRAMVDVMRAVFILE

SEQ ID NO: 10764 - protein, 168 aa, Lycopersicon esculentum
TRLNCVIVSVDGSEESMNALNWTLDNIKLKPHDPDSPESQGFIVILHVQSPPSIAAGLNPGAIPFGGPSDVEVPAFTAAIEAHQKRITQAILDHALGICAKKNANVKTQVVIGDPKEKICDAVEEMNADLLVMGSRAFGPIKRMFLGSVSNYCTNHAQCPVIIVKATP

SEQ ID NO: 10765 - protein, 435 aa, Zea mays
  unsure (1)..(435): unsure at all Xaa locations
MVLDLNVASPADSGTSSSSVLNSADGGFRFGLLGSPVDDDDCSGEMAPGASTGFMTRQLFPSPTPPAEPEPEPVAAPVPVWQPQRAEDLGMAQRPVAPAKKTRRGPRSRSSQYRGVTFYRRTGRWESHIWDCGKQVYLGGFDTAHAAARAYDRAAIKFRGLDADINFSLSDYEDDLKQMRNWTKEEFVHILRRQSTGFARGSSKYRGVTLHKCGRWEARMGQLLGKKYIYLGLFDSEVEAARXAYDRAALRFNGREAVTNFEPSSYNAGDNNLRDTETEAIDDGDAIDLDLRISQPNVQDPKRDNTLAGLQPTCDSPESSNTMASQPMSSSSPWPGYHQNPAVSFHHQRLYSSACHGFFPNHQVQERPVERRPELGAQPFPSWAWQAQGSPHVPLHHSAASSGFSTAAGANGGMPLPXSHPPAQFPTTTNPFFFP

SEQ ID NO: 10766 - protein, 542 aa, Manihot esculenta
MAMNVSTTIGLLNATSFASSSSINTVKILFVTLFISIVSTIVKLQKSAANKEGSKKLPLPPGPTPWPLIGNIPEMIRYRPTFRWIHQLMKDMNTDICLIRFGRTNFVPISCPVLAREILKKNDAIFSNRPKTLSAKSMSGGYLTTIVVPYNDQWKKMRKILTSEIISPARHKWLHDKRAEEADNLVFYIHNQFKANKNVNLRTATRHYGGNVIRKMVFSKRYFGKGMPDGGPGPEEIEHIDAVFTALKYLYGFCISDFLPFLLGLDLDGQEKFVLDANKTIRDYQNPLIDERIQQWKSGERKEMEDLLDVFITLKDSDGNPLLTPDEIKNQIAEIMIATVDNPSNAIEWAMGEMLNQPEILKKATEELDRVVGKDRLVQESDIPNLDYVKACAREAFRLHPVAHFNVPHVAMEDTVIGDYFIPKGSWAVLSRYGLGRNPKTWSDPLKYDPERHMNEGEVVLTEHELRFVTFSTGRRGCVASLLGSCMTTMLLARMLQCFTWTPPANVSKIDLAETLDELTPATPISAFAKPRLAPHLYPTSP

SEQ ID NO: 10767 - protein, 363 aa, Triticum aestivum
FALAHSGLCAAFSRVTNKRLSFLNLSPDEVIRSLFYNKNNDSLITVSVYASDHFSTLKCRTTPIEYIRRDQLDAGFPLFESESLKWPGFVEFDGYDGEKTTEVDGDGIYKVFDLKNYSFLYSIPDTNVQEIKISPGIMLLIYDRTPSYVPLRILSIEDGQPLKLFKHLLHRGKKIDFIEQFNEKLLVKQEDENLQILDVRSSELIEISIEKFMTPSAFIFLYENNLFLTFRNRTVAVWNFRGELVTSFEDHLLWHQDCSTNNIYITTDQDLIISYCKSDAAADDGTASSIGSINMSDIMTGKCIAKIAANDPALTIAPRKNGSPSIWSSIPEALEDVTALFYDEDRNEIYTGNSQGLVHVWSS

SEQ ID NO: 10768 - protein, 339 aa, Ralstonia metallidurans
MAETLLLTGATGYIASHTWVALHEAGYNVIGLDNLCNSSAEVVNRLAKITGTTPHFVEGDVRDRALLDRLLAEHKINGAIHFAALKAVGESVSKPLEYYGNNLEGLITLCSAMQSAGVRQLVFSSSATVYGNPHAMPILENFPLSATNPYGQTKLMGEQILRDLEISDPEWKIAFLRYFNPVGAHESGTIGEDPGGIPNNLMPYVAQVAAGRREKLSVYGGDYPTPDGTGVRDYIHVSDLADGHVAALAYLGKNSRGMTVNLGTGRGYSVLEVVKAYERASGRPIPYEIVARRPGDIAECYADPGIARTLLGWSARHDLDRMCEDSWRWQSLNPVGFTA

SEQ ID NO: 10769 - protein, 499 aa, Hordeum vulgare
MIGTRVLAHSRVDPAIRWGVAARGRVVFAAIRWGAAARGRVVFAAVRWGAAARGTKREAGQETSTSETKKTKRKWGRGFCGMASHEVEEPLTSETKKTKRKWGRGFCGMASHEAEEPLTSETKKKRKNVAASSEPDKKRWFKNKIWKKKKAKNEQLATLVKEISLATKLNSAMHVNINLSMNICPTQTYEEHSGTYLRNLAVIAVKQLDKDGLQGNREFLVEVLMLSLLHHPNLVTLLGYCTECDQKILVYEYMPLGSLQDHLLDLTPKSQPLSWHTRMKIAVDAARGLEYLHEVANPPVVYRDLKASNILLDGNFSAKLADFGLAKLGPVGDKTHVTTRVMGTYGYCAPEYAMSGKLTKMSDIYCFGVVLLELITGRRAIDTTKPTREQILVHWAAPLFKDKKKFTKMADPLLDSKYPLKGLYQALAISSMCLQEEAISRPLISDVVTALTFLADPNYDPPDDIEPLPISVPNYDKGISLREAEISLSGFEEKQVEDS

SEQ ID NO: 10770 - protein, 187 aa, Zea mays
PPPPFFPLPPRLHPFPSISSHLATPLPLSRADRLAHPSIEHGKKIPVRRGLNSIGLVLVWVGTMAATEASADKNAVFRKLRTKSDNKMCFDCNAKNPTWASVTYGVFLCIDCSAVHRSLGVHVSFVRSPRLASPHLTCFPFLLTLVHVRGTVAMPPVHDSNTNLLQWLTDRSRVHISNINLLQLVTD

SEQ ID NO: 10771 - protein, 124 aa, Glycine max
PKPTPTGGEPPTSQPSKMQYNNLGRSGLRVSQLSYGAWVTFGNQLDVKEAKSLLQACRDAGVNFFDNAEVYANGRAEEIMGQAIRDLGWRRADVVISTKLFWGGQGPNDKGLSRKHVVEGLKAS

SEQ ID NO: 10772 - protein, 253 aa, Zea mays
  unsure (1)..(253): unsure at all Xaa locations
MAEREQQEQVASDDAAEWKQVAELRAVTQAQDPSCKDEDDYTLRRFLRARDHNIGKASAMLLKYLKWKPAAKPHGAIAAAEVAREAAQGKLYLQGHDRXGRPLIYGFGARHHPARRDLDEFKRYVVHVLDATVARLPPPPPPPGDARQEKFAAVADLAGWGYANCDIRGYLAALDIMQSYYPERLARVFLVHVPYVFMAAWKIVYPFIDDNTKKKFVFVPDKDLDRTLREAIDDSQLAEIYGGKLKLVAPPAN

SEQ ID NO: 10773 - protein, 431 aa, Shigella dysenteriae
MLERLSWKRLVLELLLCCLPAFILGAFFGYLPWFLLASVTGLLIWHLWNLLRLSWWLWVDRSMTPPPGRGSWEPLLYGLHQMQLRNKKRRRELGNLIKRFRSGAESLPDAVVLTTEEGSIFWCNGLAQQILGLRWPEDNGQNILNLLRYPEFTQYLKTRDFSRPLNLVLNTVRHLEIRVMPYTHKQLLMVARDVTQMHQLEGARRNFFANVSHELRMPLTVLQGYLEMMDEQPLEGAVREKALHTMREQTQRMEGLVKQLLTLSKIEAAPTQLLNEKVDVPMMLRVVEREAQTLSQKKQTFTFEIDNALKVSGNEDQLRSAISNLVYNAVNHTPEGTHITVRWQRVPHGAEFSVEDNGPGIAPEHIPRLTERFYRVDKARSRQTGGSGLGLAIVKHAVNHHESRLNIESTVGKGTRFSFVIPERLIAKNSN

SEQ ID NO: 10774 - protein, 845 aa, Kluyveromyces marxianus
MSKFDVEQLLSELNQDEKISLLSAVDFWHTKKIERLGIPAVRVSDGPNGIRGTKFFDGVPSGCFPNGTGLASTFDRDLLETAGKLMAKESIAKNAAVILGPTTNMQRGPLGGRGFESFSEDPYLAGMATSSVVKGMQGEGIAATVKHFVCNDLEDQRFSSNSIVSERALREIYLEPFRLAVKHANPVCIMTAYNKVNGDHCSQSKKLLIDILRDEWKWDGMLMSDWFGTYTTAAAIKNGLDIEFPGPTRWRTRALVSHSLNSREQITTEDVDDRVRQVLKMIKFVVDNLEKTGIVENGPESTSNNTKETSDLLREIAADSIVLLKNKNNYLTSKERRQYHVIGPNAKAKTSSGGGSASMNSYYVVSPYEGIVNKLGKEVDYTVGAYSHKSIGGLAESSLIDAAKPADAENAGLIAKFYSNPVEERSEDEEPFHVTKVNRSNVHLFDFKHEKVDPKNPYFFVTLTGQYVPQEDGDYIFSLQVYGSGLFYLNDELIIDQKHNQERGSFCFGAGTKERTKKLTLKKGQVYNVRVEYGSGPTSGLVGEFGAGGFQAGVIKAIDDDEEIRNAAELAAKHDKAVLIIGLNGEWETEGYDRENMDLPKRTNELVRAVLKANPNTVIVNQSGTPVEFPWLEEANALVQAWYGGNELGNAIADVLYGDVVPNGKLSLSWPFKLQDNPAFLNFKTEFGRVVYGEDIFVGYRYYEKLQRKVAFPFGYGLSYTTFELDISDFKVTDDKIDISVDVKNTGDKFAGSEVVQVYFSALNSKVSRPVKELKGFEKVHLEPGEKKTVNIELELKDAISYFNEELGKWHVEAGEYLVSVGTSSDDILSVKEFKVEKDLYWKGL

SEQ ID NO: 10775 - protein, 344 aa, Bacteroides thetaiotaomicron VPI-5482
MKERILVTGGTGYIGSHTVVELQNSGYEVIIIDNLSNSSADVVDNIEKVSGIRPAFEKLDCLDFAGLDAVFAKYKGIKAIIHFAASKAVGESVEKPLLYYRNNLVSLINLLELMPKHGVEGIVFSSSCTVYGQPDELPVTEKAPIKKAESPYGNTKQINEEIIRDTIASGAPINAILLRYFNPIGAHPTALLGELPNGVPQNLIPYLTQTAMGIREKLSVFGDDYDTPDGSCIRDFINVVDLAKAHVIAIRRILEQKQKEKVEVFNIGTGRGVSVLELINGFEKATGVKLNYQIVGRRAGDIEKVWANPDYANQELGWKAVETLEDTLRSAWNWQLKLRERGIQ

SEQ ID NO: 10776 - protein, 392 aa, Janusia californica
DLEPVNPADVPVTAAGALKSYKLASKAISRLQSLPSGNISLLCDVLVKEVRDLTGYDRVMVYKFHEDEHGEVVSECRRSDLESYLGLHYPATDIPQASRFLFMKNKVRMICDCLAPPVKVIQDERLPQPLSLCGSTLRSPHGCHAQYMTNMGTIASLVMSVTVNEGDDTMDGDQQRMTRKLWGLVVCHHTSPQFVPFPLRYACEFLIQVFGVQINKEVELAAQVREKHILQIQTMLCDMLLRDAPVAIITQSPNVMDLVKCDGAALYFKNKTWLLGVTPTEEQIRGIAEWLLKYHSGNTGLSTDSLMEAGYPGASGLGDAVCGMAAVSITSRDFLFWFRSHTAKEIKWGGAKHDPDDKDDLRKMHPRSSFKAFLEVVKWRSMPWEDVEMDAI

SEQ ID NO: 10777 - protein, 266 aa, Gossypium herbaceum
LSIEEVEVAPPQKDEVRIKILFTSLCHTDVYFWDAKGQNPLFPRILGHEAGGIVESVGEGVTDLKPGDHVLPIFTGECKECPHCLSEESNMCDLLRINTDRVGMINDGKSRFSINGKPIYHFLGTSTFSEYTVVHVGQVAKINPHAPLDKVCVLSCGMSTGFGATVNVAKPKKGQSVAIFGLGAVGLAAAEGARVSGASRIIGIDLNPSRFEQAKKFGVTDFVNPKDYNKPVQEVIVEMTGGGVDRSVECTGSIQAMISAFECVHD

SEQ ID NO: 10778 - protein, 71 aa, Glycine max
  unsure (1)..(71): unsure at all Xaa locations
FSPPNEKPVKMFVXKKISFLDIFKVGELPCRGPPKDLVASPPPEKIFPYAQWARQYAVSLQKASSVLIPNF

SEQ ID NO: 10779 - protein, 309 aa, Glycine max
MAAMQRPLKRTIAIAKLRACFSSLRPAAAADIVASPPPQLPPFDHQPHPYNGPFADEVLAKRKTFLDPYRGAFGADAASYANDVQDHIDYGTSGKVAGFIAETMQGVGGAVELAPGYLKLVYDIIHKAGGVCIADEVQTGFGRTGSHYWGFETQGVIPDIVTMAKGIGNGLPLGAVVTTPEIASVLAQKIQFNTFGGNPVCSAGGLAVLRVLDKEKRQAHCADVGSHLLERLRFLMERHDSIELVTDRDNKTPAKAETAVVFEKLRELGVLVGKGGLHGNVFRIKPPMCFSKDDADFLVDALDYSLSKL

SEQ ID NO: 10780 - protein, 139 aa, Glycine max; identical to SEQ ID NO: 1310

SEQ ID NO: 10781 - protein, 254 aa, Glycine max
  unsure (1)..(254): unsure at all Xaa locations
MEAVRAGREGAIGLGQGDGVAKDSTETELTKIRLLRAIVETRDPSSKEEDDFMIRRFLRARDLDVEKASAMLLKYLKWRNSFVPNGSVSVSDVPNELAQDKVFMQGHDKIGRPILMVFGGRHFQNKDGLDEFKRFVVYVLDKVCASMPPGQEKFVGIAELKGWGYSNSDVRGYLSALSILQDYYPERLKLFIVNAPYIFMKVWQIVYPFIDNKTKKKIVFVEKXGKSTLLRHEEESQVPEIFGGSLPLVPIQDS

SEQ ID NO: 10782 - protein, 166 aa, Zea mays
  unsure (1)..(166): unsure at all Xaa locations
KHTISTSPPPLGFPSTSPCPPSRSSKAKAAAASAAVVVDDIAELQGMLERLRLEKEKAEEMVRERDEVIRKKEEEIETRDKEQERLQAELRKAQRAKEFKPTVSFPLVKSLLEKEQEADDKGKKKKGKGGHERKKPCPAYVLWLKDQWTEVKKENPEXDFKEVSNT

SEQ ID NO: 10783 - protein, 151 aa, Photobacterium leiognathi
QDLTVKMTDLQTGKPVGTIELSQNKYGVVFTPELADLTPGMHGFHIHQNGSCASSEKDGKVVLGGAAGGHYDPEHTNKHGFPWTDDNHKGDLPALFVSANGLATNPVLAPRLTLKELKGHAIMIHAGGDNHSDMPKALGGGGARVACGVIQ

SEQ ID NO: 10784 - protein, 214 aa, Paeonia mlokosewitschi
IVESVGEGVTDVKPGDHVFPIFTGECKECRHCKSEESNMCDLLRINTDRGVMLNDGQSRFSINGQPIFHFVGTSTFSEYTVLHVGCLAKINEEAPLDKVCVLSCGISTGLGATLNVAKPKKGSTVAIFGLGAVGLAAAEGARIAGASRIIGVDLNPKRFDEARKFGVTEFVNPKDYNKPVQEVIAEMTGGGVDRSVECTGSIMAMMSAFECVHD

SEQ ID NO: 10785 - protein, 155 aa, Glycine max
MASTKKITLKSSDGEAFEVEEAVALESQTIKHMIEDDCADSGIPLPNVTSKILAKVIEYCKKHVEANSADEKPSEDVLKAWDADFVKVDQATLFDLILAANYLNIKSLLDLTCQTVADMIKGKTPEEIRKTFNIKNDFTPEEEEEVRRENQWAFE

SEQ ID NO: 10786 - protein, 46 aa, Picea mariana
GSLDEFSFEDYLNDPRESETFVPADMHHGMEVRLGLSKGPVCRSFI

SEQ ID NO: 10787 - protein, 576 aa, Solanum tuberosum
MLDSGKQIDFSKRKKKIYLAIVASVLLVAAVIGVVAGVKSRSNNSDDDADIMAISSSAHAIVKSACSNTLHPELCYSAIVNVTDFSKKVTSQKDVIELSLNITVKAVRRNYYAVKELIKTRKGLTPREKVALHDCLETMDETLDELHTAVADLELYPNKKSLKEHAEDLKTLISSAITNQETCLDGFSHDEADKKVRKVLLKGQKHVEKMCSNALAMICNMTNTDIANEMKLSGSRKLVEDNGEWPEWLSAGDRRLLQSSTVTPDVVVAADGSGDYKTVSEAVAKAPEKSSKRYVIRIKAGVYRENVDVPKKKTNIMFMGDGRSNTIITASRNVQDGSTTFHSATVAAVGEKFLARDITFQNTAGASKHQAVALRVGSDLSAFYKCDILAYQDTLYVHSNRQFFVQCLVAGTVDFIFGNGAAVLQDCDIHARRPGSGQKNMVTAQGRTDPNQNTGIVIQKCRIGATSDLRPVQKSFPTYLGRPWKEYSRTVIMQSSITDVIQPAGWHEWNGNFALNTLFYGEYANTGAGAATSGRVKWKGHKVITSSTEAQAYTPGSFIAGGSWLSSTGFPFSLGL

SEQ ID NO: 10788 - protein, 408 aa, Sulfolobus solfataricus
MSTKSEHMITIGIIGKTNVGKSTFFAAATLKDVEIANRPFVTINPNEGIGYVKVKCAHTEFNVKCNPKNSICIEDYRFIPVKLVDVAGLIPGAHEGRGLGNKFLDDLRQADALIHVIDASGSTNEEGVPVEPGSRDPEEDIKFIESELDEWFYSIINKDWAKFARTSDLSGKDLVDALLSKLSGVSVNRSHIIETLKVTKLENLKLMQWTEQDLRVFAKTLRSVSKPMIIAANKSDLPQARNNIRRLKEKYKWAIPTSAASEMALRKAAKAGIISYIPGDSDFTILKPLNEKQKSALEYIRTSVLQVYGSTGVQQAINTAIFDALNMIVTYPVEDERKLTDKNGNVLPDAILLKKGSTPKDLANAIHTELAKGFLYAIDVKRKMRVGENYQLQNNDVIKIVSSTARPS

SEQ ID NO: 10789 - protein, 173 aa, Helicobacter pylori
MNLEKLEISHDANALCVVIEISKHSNIKYELDKESGALMVDRVLYGAQNYPANYGFVPNTLGSDGDPVDVLVLSDVAFQAGSVVKARLVGVLNMEDESGMDEKLLALPIDKIDPTHSYVKDIDDLSKHTLDKIKHFFETYKDLEPNKWVKVKGFENKESAIKVLEKAIKAYQG

SEQ ID NO: 10790 - protein, 211 aa, Triticum aestivum
  unsure (1)..(211): unsure at all Xaa locations
EEGEKKARGRRERREGAGAGSKRGEETEQDEGRKGYKEGGRSGILRGERRAEEEGRGEGRIAVDDNCVDAIYKHVFPVEVAPDLSFIGVPWKVIPXLPLVELQSKWVAGILSGRIKLPSKDEMMEDVKAIYSRLETRGWPKRYTHNFSGGYQFEYDDWLAEQCGHPPVEEWRKLMYAANAKNKAARPERYRDEWDDDGLVALANEDFKKYF

SEQ ID NO: 10791 - protein, 355 aa, Zea mays
MSVLYMRNNMSNRATHWCYACRRPIRLRGQDIICPNCNDGFIQEISEMGGVLNTYGLIEPDFEERQARRFGMMDAISSLMRQRLSEIGRDSLFDIHGRQGTGTEYGRRSTAIPTLVFGGIPSPAVGSSDVNVVIREGRRAGAARPNFSSLVVGPSLEALFEQLLLQNNRQGPPPAPQSAIDSMPVVKINRRHLDEDPQCAVCKDKFEVGAEAREMPCKHLYHTDCIIPWLVQHNSCPVCRHPLPSQRSGSSTSSARVPSAYYNETACPPAVARADFDPVPSAYYNETATDPPAVTRADFDPAPGNYGSESQESHDPFSFLWPFGPSSSYQYEENVDEPAVYDPNQIAYSAWHYDH

SEQ ID NO: 10792 - protein, 334 aa, Triticum aestivum
MASGEGTGDSNAAGAGMEVPEVELCLDLTSCQLHDLSEVEIPPTLEELDLTANRLTAVDPRIGHLPRLRKLSFRQNLLDDDAVAPLFTWDAIAGLQEIVLRDNKLIKIPDASIFKGLLVFDVSFNELSSLNGLSKVSSTVKELYFSKNEVPKMEELEHFHALELLELGSNRLRVMENLETLTNLQELWLGRNRIRTINLCGLKSIKKISLQSNRLTSMNGLQECVALEELYLSHNGIQKMEGLSMLQNLRVLDVSSNKLTAIEDIEPLTRLEDLWLNDNQIPSLSGIESALSGSREKLTTIYLERNPCAKTPNYSSTLKEMFPNLEQIDSDMLA

SEQ ID NO: 10793 - protein, 359 aa, Schizosaccharomyces pombe
MLVSSNEEQLTAHTPTSSSSIEPKILAACSYSLSVGPCSLAVSPKGVNSKSPSLKNETAFVVDSVSTLSAESSALLYNTQSSLLTGLSMNGYLGEYQEDIIHHLITREKNFLLNVHLSNQQPELRWSMRPALVNFIVEIHNGFDLSIDTLPLSISLMDSYVSRRVVYCKHIQLVACVCLWIASKFHETEDRVPLFEELKLACKNIYAEDLFIRMERHILDTLDWDISIPTPASYIPVLDPIFFLVLDASMFVPNLFKFPASKIACSVMNIVNEHVGSFLLTHPSMESYRKDDNFLWPEDLDTVTSYMENMSKRYANEECTDLLFSSLGRISSILAKKYPEQCAMAAWCNMTEKDTERTL

SEQ ID NO: 10794 - protein, 73 aa, SINNINGIA MICANS
ISGTNGEVMPGQWEFQVGPSVGIEAGDHIWCARYLLERITEQAGVVLSLDPKPIEGDWNGARCHTNYSTKSMR

SEQ ID NO: 10795 - protein, 245 aa, Gymnosporia mossambicensis
ALSIAGAVQSQKPAVRAISQLQSLPGGDIKLLCDTVVESVRNLTGYDRVMVYKFHEDEHGEVVAESKRSDLEPYIGLHYPASDIPQASRFLFKQNRVRMIVDCHASPVRVIQDDGLMQPLCLVGSTLRAPHGCHAQYMENMGSLASLAMAVIINGNEEEAIGGRSPTRLWGLVVCHHTSARCIPFPLRYACEFLMQAFGLQLNMELQLAAQLLEKHVLKTQTLLCDMLLRDSPTGIVTQSPSIMD

SEQ ID NO: 10796 - protein, 227 aa, Zea mays
  unsure (1)..(227): unsure at all Xaa locations
MAEEKKQGLQLLDFWVSPFGQRCRIAMDEKGLAYEYLEQDLGNKSELLLRANPVHKKIPVLLHDGRPVCESLVIVQYLDEAFPAAAPALLPADPYARAQARFWADYVDKKLYDCGTRLWKLKGDGQAQARAEMVEILRTLEGALGDGPFFGXGDALGFVDVALVXPFTSWFLAYDRFGGVSVEKECPRLAXAWAKRCAERPSVAKNLYPPEKVYDFVCGMKKRLGIE

SEQ ID NO: 10797 - protein, 226 aa, Mycobacterium avium subsp. paratuberculosis
MPKLLPPVVLAGCVVGCACSSPQHASSLPGTTPAVWTGSPSPSGAGAAEAAPAAAPSITTHLKAPDGTQVATAKFEFSNGYATVTIETTANGVLTPGFHGVHIHKVGKCEPSSVAPTGGAPGDFLSAGGHFQAPGHTGEPASGDLTSLQVRKDGSGTLVTTTDAFTMEDLLGGRKTAIIIHAGANNFANIPAERYNQTNGTPGPDEMTMSTGDAGKRVACGVIGAG

SEQ ID NO: 10798 - protein, 335 aa, Pyrococcus horikoshii
MIGEIYYSRKFLLHKPKNYHPENPGRLWIILTAIRELGLENQIVEPLPIDEAQIYKIHDPEYVKRIRGLSLNGGGYLDADTYVNQRTWEVAMLALGASRLATLSALEYGGLNMALVRPPGHHAGRRGRALGAPTLGFCIFNNSAMAALTCKEETGEALIIDFDAHHGNGTQEIFWNDPEVVHVDLHERDIYPGSGDVNEIGGYNARGSKINIPMPHYSDDGDYIYAWNEIVLPIVERVKPKVIIVSAGFDGFKGDGLTTLKLTEIFYSYAGVTLRKYPLVLILEGGYSSGLKRGFPAFIMGYEEDKIKRDEGQPSYETLKVVEEVKDILSPWWPL

SEQ ID NO: 10799 - protein, 178 aa, Geobacter metallireducens
MMIRSFQGMNPRIDSSAFIAETAVVIGDVTVGAESSIWYNVVVRGDVNFIRIGARSNIQDLTMLHVTHKKHADDPGAPLVIGDDVTVGHSVTLHGCTIENGAFIGMQAMVMDKAVVGEGALVGARALVTEGTVIPPHTLWVGAPARYKRDLTPDEIAWLKRSAGNYVRYSREYLDDTP

SEQ ID NO: 10800 - protein, 229 aa, Corylopsis sinensis
VQLKRMENKINRQVTFSKRRAGLLKKANEISVLCDAEVGLIVFSTKGKLYDMERIFDRYERYSYAERQLVVTNHESQGSWTIEHAKLKARMEVLQRNQRHFMGENLDSVSLKELQNLEHQLDNALKHIRSRKNLLMQESISELQRKDKSLQEENNSLSKKIKEKENALAHRAQWEQQNQGLNSFPILLSQPPQSLNIGTYQTGCSEGEEGTPFQQRPNTLLPHWMVSHL

SEQ ID NO: 10801 - protein, 183 aa, Triticum aestivum
  unsure (1)..(183): unsure at all Xaa locations
IEPLHWLGRLGRKAPLPGVYDDECDEDGGVDNILQNNNELVVKGTAKFXPGMLDFSRLVDANAQEPSTGPINSVQFHRNGQLMLAAGLDKHLRFFQIDGERNPKIQSIFIQDPPQKKIIEDCPVYKASFLPDGSEVILSGXRKFFYSFDLXEAAVSKIGPLTGREEKSLESFAISPDSKTIAS

SEQ ID NO: 10802 - protein, 371 aa, Pseudomonas putida KT2440
MMIKSRAAVAFEAKKPLEIVEVDVAMPKAGEVLLRVVASGVCHTDAYTLSGADPEGIFPSILGHEGGAIVEAVGEGVTSLAVGDHVIPLYTPECGKCKFCLSGKTNLCQAIRATQGKGLMPDGTTRFSYKGQQLFHYMGTSTFSEYTVLPEISVAKIQKEAPLEKVCLLGCGVTTGIGAVLNTAKVKPGDTVAIFGLGGIGLSAVIGAVKAKASRIIAIDINPAKFEIARQLGATDCVNPKDYDRPIQEVIVDLTDGGVDFSFECIGNVQLMRAALECCHKGWGESVIIGVAGAGQEISTRPFQLVTGRVWRGSAFGGVRGRSELPSYVEMSEKGEIPLDTFITHTMGLEDINKAFDLMHEGKSIRSVIHF

SEQ ID NO: 10803 - protein, 149 aa, Phaseolus vulgaris
MADQLTDEQISEFKEAFSLFDKDGDGCITTKELGTVMRSLGQNPTEAELQDMINEVDADGNGTIDFPEFLNLMARKMKDTDSEEELKEAFRVFDKDQNGFISAAELRHVMTNLGEKLTYEEVDEMIREADVDGDGQINYEEFVKVMMAK

SEQ ID NO: 10804 - protein, 350 aa, Zea mays
RPTRPLANPIPDPDSPLASRSLAAAPSFSPIGSATLESRPRRYRLSGSGAPSSTPPPPSSIPPVQGPSLVYRAVLFGGLSNDVISAGALGITTAQLVRINDLHSRTVHQENALSNRLATLQEDIANRPLLPIVRQRELATATRLGAAASGSCDGAARRWLRAARLGEPEPVLSRSLVPPCTPRRLLRARDHDVDKASAMFLKFLKWRREAAPGGSVPEEQVRRELSQDKLCMGGVDRAGRPILVAFAARHFSAGRDMAEFKSFVVYFFDKICARIPRGQEKFLCIVDLKGWGYSNCDVRAYIAAIEILQYFYRLTRYIQRRRLLPRLLNKSPVMMTLATRPLNLMSFQSF

SEQ ID NO: 10805 - protein, 336 aa, Leuconostoc mesenteroides subsp. mesenteroides ATCC 8293
MTFCHVHNIIFKDENMTVKTMNPIFEKLGMKYPIVEGGMTWAGTGALAAAISEAGGLGFIGTGYWHGDDVRKEIRRAKALTDKPFGVNVMLLSRHIREVFDVIIEEKVAVVATGAGDPSPFLDELHAAGIIVMPVVPSVSLARMMEKKGVDAVIAEGMESGGHIGMLTTMTLVPQVADAVNIPVIAAGGIGDGRGVAAAFMLGAAGAQMGTRFLTATESEVHPNFKSKILKAKDIDTIVTGNLLGNRARVLKNKMAKSFVKNEVNELQKEKPDAAAIEKLESGTLRRAVQEGDKEGGAFMAGQISGLIKDEKPAADILSDIWAQATDLMGIENTTL

SEQ ID NO: 10806 - protein, 129 aa, Zea mays; identical to SEQ ID NO: 9008

SEQ ID NO: 10807 - protein, 357 aa, Musa acuminata
MAAAGTNGAVVVVVGEGDLKATFRQIYDRLKSELLQDDAFDCTDEARQWIDRMLDYNVPGGKLNRGLSVIDSYKLLKEGNQLNDEEVFLGCALGWCIEWLQAYFLVLDDIMDNSHTRRGQLCWFRVPKVGLIAVNDGILLRNHIPRILKRHFKGKPYYVDLLDLFNEVEFQTASGQMLDLITTHEGEKDLSKYTLPVYNRIVQYKTAYYSFYLPVACALLMAGENLDTFVDVKNILVEMGTYFQVQDDFLDCFGDPEVIGKIGTDIEDFKCSWLVVQALQRANENQMKTLSEIYGKSDPTCVAKVKSIYKDLDLQNVFAEYERTSYEQLISSIEAQPSKAVQGVLKSFLQKIYKREK

SEQ ID NO: 10808 - protein, 203 aa, Escherichia coli O157:H7 EDL933
MERTLTTVSYYAFEGLIPVVHPTAFVHPSAVLIGDVIVGAGVYIGPLASLRGDYGRLIVQAGANIQDGCIMHGYTDTDTIVGENGHIGHGAILHGCVIGRDALVGMNSVIMDGAVIGEESIVAAMSFVKAGFHGEKRQLLMGTPARAVRSVSDDELHWKRLNTKEYQDLVGRCHASLHETQPLRQMEENRPRLQGTTDVTPKR

SEQ ID NO: 10809 - protein, 305 aa, Miscanthus sinensis f. glaber
IESVGEDVTDVAPGDHVLPVFTGECKERAHCRSAESNMCDLLRINTDRGVMIGDGKSRFSINGKPIYHFVGTSTFSEYTVMHVGCVAKINPQAPLDKVCVLSCGISTGLGASINVAKPPKGSTVAIFGLGAVGLAAAEGARIAGASRIIGVDLNPSRFEEARKFGCTEFVNPKDHKKPVQEVLAEMTNGGVDRSVECTGNINAMIQAFECVHDGWGVAVLVGVPHKDAEFKTHPMNFLNERTLKGTFFGNFKPRTDLPNVVELYMKKELEVEKFITHSILFAEISKAFDLMAKGEGIRCIIRMEN

SEQ ID NO: 10810 - protein, 475 aa, Arabidopsis thaliana; identical to SEQ ID NO: 318

SEQ ID NO: 10811 - protein, 452 aa, Pseudomonas aeruginosa UCBPP-PA14
MRPCASCWTTCSPTVASATTCVPWRARAASRSWRSGAAMTRSSRRGMPRACQPRWRSFPDRRTWCRWRPPSRSTACCSTSSASIEETTDMNSSPQANAAMRAAVWHGRHDIRVEDVPLPAEPPPGWVQIRVHWCGICGSDLHEYLAGPVFIPVEAPHPLTGLKDQCILGHEFSGEIVRLGNGVTGFALGQAVAADACQHCGTCYYCRHGLYNICENLAFTGLMNNGAFAEYVNVPANLLYALPAGFPSEAGALIEPLAVGMHAVKKAGSLLGQNVVVVGAGTIGLCTIMCARAAGAAQVIALEMSSARKAKALEVGASQVLDPSRCDALGEIRALTGGLGADVSFECIGNKHTAKLAIDAIRKAGKCVLVGIFEEPSEFNFFELVSTEKQLLGALAYNGEFADVIAFIADGRLDIAPLVTGRIGLEEIVERGFEELVNNKEHNVKIIVSPGG

SEQ ID NO: 10812 - protein, 470 aa, Glycine max
MGSMHIETPETFADGSKNFDDDGRAKRTGTWITASAHIITAVIGSGVLSLAWAIAQMGWVAGPAVLFVFSLITYFTSTLLADCYRSPDPVHGKRNYTYSEVVKANLGGRKFQLCGLAQYINLVGVTIGYTITASLSMGAVKKSNCLHKHGHQDECKVKDNAFMIAFACIQILLSQIPNFHKLSWLSIVAAVMSFAYSSIGLGLSIAKIIGGGHVRTTLTGVEVSGTEKVWKMFQAIGDIAFAYAFSNVLIEIQDTLKSSPPENKVMKRASLIGIMTTTLFYVLCGCLGYAAFGNDAPSNFLTGFGFYEPFWLIDFANVCIAVHLVGAYQVFVQPIFGFVEKWSKENWTESQFINGEHTLNIPLCGSYNVNFFRVVWRTAYVIITAVVAMLLPFFNDFLALIGALSFWPLTVYFPIEMYIKKSNMQRFSFTWTWLKILSWVCLIISIISLVGSIQGLSVSIKKYKPFQAEQ

SEQ ID NO: 10813 - protein, 214 aa, Paeonia mlokosewitschi
IVESVGEGVTDVKPGDHVLPIFTGECKECRHCKSEESNMCDLLRINTDRGVMLNDGKSRFSINGQPIFHFVGTSTFSEYTVLHVGCLAKINEEAPPDKVCVLSCGISTGLGATLNVAKPKKGSTVAIFGLGAVGLAAAEGARIAGASRIIGVDLNPKRFDEARKFGVTEFVNPKDYNKPVQEVIAEMTGGGVDRSVECTGSIMAMMSAFECVHD

SEQ ID NO: 10814 - protein, 508 aa, Zea mays
  unsure (1)..(508): unsure at all Xaa locations
MVSERQQAAGKVAAFNLTEAGFGDGSDLLDDDGRERRTGTLVTASAHIITAVIGSGVLSLAWAIAQLGWVIGPVVLLAFSAITWFCSSLLADCYRAPPGPGQGKRNYTYGQAVRSYLGESKYRLCSLAQYVNLVGVTIGYTITTAISMGAIKRSNCFHSRGHGADCEASNTTNMIIFAGIQILLSQLPNFHKLWWLSIVAAVMSLAYSSIGLGLSIAKIAGKLMHGSYCTYVLSLILSRDFXLTAGGVHVKTSLTGAAVGVDVTAAEKVWKTFQSLGDIAFAYTYSNVLIEIQDTLRSSPPENVVMKKASFIGVSTTTAFYMLCGVLGYAAFGSDAPGNFLTGFGFYDPFWLIDVGNVCIAVHLVGAYQVFCQPIYQFVEAWARGRWPDCAFLHAELAVVAGSSFTASPFRLVWRTAYVVLTALVATVFPFFNDFLGLIGAVSFWPLTVYFPIQMYMAQAKTRRFSPAWTWMNVLSYACLFVSLLAAAGSVQGLVKDLKGYKPLFKVS

SEQ ID NO: 10815 - protein, 418 aa, Guillardia theta
MLILYDSVIGYCLFSVNENIINKYIDIEYENFISSYQNFSKIFKIKFFLPFKSLKHSLQNTVLINQSKISKSLQKILHLAFDLKEKNNIGVFDSKLAFKLNKIFNNYLIVDEKCLKLIKTIRLYFDRIIEKLIPNDIKKTRNGVAHFYSELKLKMSSSNLEFSIIQSSMILDQLDKDNNFFSTMCRELYSFHFPELSNLIKDNFNFCLLVKLIGDKKTLNINNFKEILLIIYNERLTYEIIKSSNQSIGICMDKIDYILLEKIANLVIASFELKNVLIKHIKAKMKKVCPNLVNLIGEVLGSKILSHAGSLKNLAKLPSSTIQILGAEKNLFSALKKNEKTPKYGIIVNSKLISKISNSNKYKFARYIANKISLSARIDFFSGAKCTSYGKNFKSQIKIQISSIDMSGIRTRDNLLAP

SEQ ID NO: 10816 - protein, 247 aa, Galdieria partita
MVASKTDLEQKVRSRLVKLFEQTPCMPIMVRLAWHDAGTYDAQTGTGGVNGSIRFDPELRHGANNGLKIALDLLEPIKKEYPDIGYADLFQLASVTAIEFAKGPKIPFRMGRKDATGPDACPEEGRLPNAEDHMSQLRRTFHRMGLSDKDITVLSGAHTLGRCHKERSGYEGPWTHQPLEFDNSYFVEILKPNPDPGLIRLASDLSLLDDSYTRSLVETYAENKDIFFKDYTESHHKLSELGAVWEY

SEQ ID NO: 10817 - protein, 571 aa, Neurospora crassa
MDHFPRLRPHRRKRDITAPSLITTPTTTKSESTSEKTESPSAELTTPTATPSLRSVHKLRPFRVFSRSSKRARESSPASHKQTPTVAAVMASNGTADHPASPAESKTSSGQQLKKDGRPKMPSFLELSESEIENKFQEIIWLERKRILEATQNPSRDFRWARVMGPHLRQLDRYGNIQPWHNNRIKLQVPEGKIDYINASPIVLPPTVLTTADGETSNTQEPDRYIAMQGPKQCTTDHVWRMAVEQLESPGVIVMLTETHEGDFEKCYQYFPRTTEDPPLEINEGDEFGDGFRATVRCAGIEDTPAGDAIELRKMVIHVHKSAGRKSVDGKSNGSQSKRQTPEPENATTEEPKITSPLTQMAKETEENLTISEPEETVGRNSEEEEVEERIVWHFLYKKWPDFGVPDLADLDSFFTLMSLSREKNAGPHNPRIVHCSAGVGRSGTFIALEHLMRELDAGVLENWDERTAGVGESLSSPVRTSQEEVMSPIGSTKGLEDNDLIFQVVNQLREQRKTMVQAESQYLFIYQVMRKLWLDKYGGDGDDSSSGERAAKRLEVDPGDPFYVNGYSEK

SEQ ID NO: 10818 - protein, 723 aa, Xanthomonas campestris pv. campestris str. ATCC 33913
MAADRIDSLIARMTVEEKVGQLGVFADMVRPFAPDVNPEANVLNADEVLQQVRQGRVGSLFNGVGAALGVQIQKVAVEESRLGIPVILAADVIHGMRTVFPIPLGEAASFEPELAERTARATAIEATAAGLHWTYAPAVDIARDQRWGRGAEGAGEDVVLGMAFAAARVRGFQGSDLKADDCLLATPKHFAAYGAVAAGMEYNTVDIAPQTLRDVHLPPFKAAFDAGALTVMSSFNDINGVPASANHELLTEILRGEWQFPGVVISDYTADMELIAHGYAADERDATKKAFLAGLDLSMQSGFYAAHLPSLVESGEVPMATLDASVRRILQLKEAIGLFDNPYRSLDPAREADTAHLPAHDALSRDAARRSIVLLKNEGDLLPLKKSGQNIALIGPFVQDRENIEGCWTLFGDKERYVTLEQGVRAVVAADNLSVVAGCGLEEPLPGGISAAIDAAQAADVVVLALGEPQRFSGEAQSRTEITLPPAQQALAEAVAATGTPMVILLRNGRALALSGAVRDADAIAVTWYLGTQTGTGVADVLFGDYNPSARLPISFPQVTGQQPYFYNHLRTGRPELPTLSEYKARWREMPNEPLYPFGHGLSYTTFAYAAPQLSTTQLGWEQTLTITTRVTNTGTVAGEEVVQLYVHDRVASRVRPVRELKGFRKVLLQPGESAEVVFTLQRDALAFTNHKGVFGAEPGLFDVWVCASAKSGEPVSFELLDR

SEQ ID NO: 10819 - protein, 431 aa, Bacillus cereus ATCC 14579
MTQQSLKRSITWVQGTALTIGAVLGCGILILPSITANSAGPASILSWVIMSILAFPIVATLARLAKMIPSAGGITAYVQMAFNANTSAILGWIMLGSIPIGVPIIALTGAHYIGYVFPISNLSVIGIAALILITSLLLHIKGIELSSKVSVFVICIISLLIVVAVIVSIPYVKLSSFTPFVPNGWSSVGASSVIIFFSFVGWEMITPLAEEFKRPAKDISISLFLGAICISIMYIAISFVTIGTHSYGDKDQIASLSILISKGLGPIGTYITTILAIFISFSAVHANIAGFSRMIYAQAREGHFPSFFAKLHSQFQTPTRVLLVLGGIFSCILIFYGMARPNLEMLLKGPSVIFITSYIFTMLAALKLLKVRDIGWWMAFLSLIICIIVYSFSGWAIFYPVILSVIGWIYIVMNKKYSTITNHSINTSNEN

SEQ ID NO: 10820 - protein, 628 aa, Nicotiana tabacum
MGRMSIPMMGFVVLCLWAVVAEGEYVKYKDPKQPVGARIKDLMKRMTLEEKIGQMTQIERKVATADVMKQNFIGSVLSGGGSVPAPKASAQVWTNMVDEIQKGSLSTRLGIPMIYGIDAVHGHNNVYGATIFPHNVGLGVTRDPDLVKRIGAATALEVRATGIPYAFAPCIAVCRNPRWGRCYESYSEDHRIVRSMTEIIPGLQGDLPAKSKNGVPYVGGKTKVAACAKHFVGDGGTLHGVDESNTVISSNSLFSIHMPAYYDSLRKGVATVMVSYSSWNGRKMHANRDLVTGFLKDKLKFRGFVISDWQGIDRITDPPHANYSYSVQAGIMAGIDMIMVPENYREFIDTLTSQVKANIIPMSRIDDAVKRILRVKFVMGLFENPMSDPSLANQLGSQEHRELAREAVRKSLVLLKNGKTPSQPLLPLPKKAPKILVAGTHADNLGYQCGGWTIEWQGVAGNDLTIGTTILTAIKKTVDPSTQVVYQQNPDANFVKSNKFSYAIVVVGEVPYAEMFGDSSNLTIAEPGPSTISNICGSVKCVVVVVSGRPVVLEPYVSKMDALVAAWLPGTEGQGVADALFGDYGFTGKLARTWFKRVDQLPMNFDDAHVDPLFPFGFGITTKPVKGY

SEQ ID NO: 10821 - protein, 182 aa, Zea mays
  unsure (1)..(182): unsure at all Xaa locations
MNRKPGDWDCRACQHLNFSRRDICQRCSEPRGVADRGGGGGGGDYASFGGRGGSSFGGGFGAAGSDVRPGDWYCSCGAHNFASRSSCFKCSAYKEEAAVNSGAGGFDSDMSRSRGYGFGSGAAGAGAGAARTTNRPGWKSGDWXICTRSGCNEHNFASRMECFRCNAPRDSGSAAMTYENYL

SEQ ID NO: 10822 - protein, 117 aa, Leavenworthia uniflora
GMIHDGESRFSINGKPIHHFLGTSTFSEYTVVHSGQVAKINPKAPLDKVCIVSCGLSTGLGATLNVAKPKKGQSVAVFGLGAVGLAAAEGARISGASRVIGVDLNSKRFEEAKKFGV

SEQ ID NO: 10823 - protein, 363 aa, Escherichia coli
MSKNYHIAVLPGDGIGPEVMTQALKVLDAVRNRFAMRITTSHYDVGGAAIDNHGQPLPPATVEGCEQADAVLFGSVGGPKWEHLPPDQQPERGALLPLRKHFKLFSNLRPAKLYQGLEAFCPLRADIAANGFDILCVRELTGGIYFGQPKGREGSGQYEKAFDTEVYHRFEIERIARIAFESARKRRHKVTSIDKANVLQSSILWREIVNEIATEYPDVELAHMYIDNATMQLIKDPSQFDVLLCSNLFGDILSDECAMITGSMGMLPSASLNEQGFGLYEPAGGSAPDIAGKNIANPIAQILSLALLLRYSLDADDAACAIERAINRALEEGIRTGDLARGAAAVSTDEMGDIIARYVAEGV

SEQ ID NO: 10824 - protein, 199 aa, Zea mays
  unsure (1)..(199): unsure at all Xaa locations
MGGFDFSNHNRNVALHAQGIPLPKATSTGTTIVGCLFDGGVVIAADTRATSGPIVADKNCEKLHFIAPQIWCAGAGTAADTEFTTAIISSNLELHALSTGRKPRVVTCMTMLKQHLFRHQGHIGAYLVVAGVDPTGAHLFTVHAHGSTDKLPYXVTMGSRFAGPPWSVFETQWKAHLTRDEAVTLCSXAIXXGIWDDLG

SEQ ID NO: 10825 - protein, 161 aa, Glycine max
VMENLQSLENLQELWLGRNRIKVVNLCGLKCIKKISLQSNRLTSMMGFDGCVALEELYLSHNGIAKMEGLSSLVNLRVLDVSSNKITLVDDIVNLTKLEDLWLNDNQIASLEGIAEAVTGSKEKLTTIYLENNPCAKTPNYTGILRKIFPNIQQIDSDIFS

SEQ ID NO: 10826 - protein, 370 aa, Brucella suis 1330
MASRKLLLLPGDGIGPEAMAEVRKVIAFLNSDLNLGFETEEGLVGGCAYDAHGQAISDADMEKALAADAVLFGAVGGPKWDSVPYEVRPEAGLLRLRKDMQLYANLRPAICYPALAHSSSLKPEVIEGLDILILRELTGGVYFGEPKEIIDLGNGQKRGIDTQVYDTYEIERIADVAFELARTRRNKVTSMEKRNVMKSGVLWNQVVTARHKEKHADVQLEHMLADAGGMQLVRWPKQFDVILTDNLFGDLLSDVAAMLTGSLGMLPSASLGAADSKTGKRKALYEPVHGSAPDIAGKGIANPIAMIASLAMCLRYSFGLVAEADRLEAAIAGVLDDGIRTADIWSEGNTKVGTTEMGDAILAKFKALSA

SEQ ID NO: 10827 - protein, 744 aa, Pseudomonas syringae
MSQLDKDAFEVLLANCADEPIQFPGAIQPHGLLFTLKEPELTILQVSANVQSVLGKVPDQLAGQTLDCVLGAGWAEVIRSTSANDSLVDVPRLLMSVEGVEFEALLHRSQEALVLELEIQDKAAQAISYSERTGNMGRMLRQLHAAADLQTLYEVSVREIQRMTGYDRVLIYRFEEEGHGQVIAEASAPAMELFNGLFFPASDIPEQARELYRRNWLRIIPDANYTPVPLVPQLRPDTQQQLDLSFSTLRSVSPIHCQYMKNMGVLSSMSVSLIQGGKLWGLISCGHRTPLYVSHELRSACQAIGQVLSLQISAMEALEVSRQRETKIQTLQQLHQMMATSDTDVFDGLAQQPQLLMDLVGATGVAIIEDRQTHCYGNCPEPSDIRALHTWMMAGGEPVYASHHLSSVYPPGEAYQTLASGVLAMSLPKPVDNGVIWFRPEVKQSVQWSGDPNKPLNLDASDNTLRLQPRTSFEIWKVEMTGIATKWSHGDVFAANDLRRSALENDLARQVSKEQQAVRARDELVAVVSHDLRNPMTVISMLCGMMQKSFSSDGPHTSRRISRQSTHAASCQPHERVARDLLDTSKIEAGRTPSRRSRWKSARYSKRPIRCSPRWRMDKSIEISFNAEPDIKVNADPERLFQVLSNLIGNAIKFTPKLGRIGVAAMSNGDEVVFTVRDSGEGIPPEQLPHIFERYWTVKEGNPTGTGLGLYISQGIIKAHGGELAAQSQVGHGSEFRFTVPIAH

SEQ ID NO: 10828 - protein, 300 aa, Sorghum bicolor
MGRRACCAKEGVKRGAWTAKEDDVLAAYVKAHGEGKWREVPQKAGLRRCGKSCRLRWLNYLRPNIKRGNISYDEEDLIIRLHKLLGNRSVSVVRAGGGRWSLIAGRLPGRTDNEIKNYWNSTLGRRAGITTGAVGGSRVVVVAPDTGGSHSRATPAASGSCETAGRQKQQGAAAAPPPPRADPDSAGSAAAAAAAGTTTAVWAPKAVRCTAGGRLFFFHRDTTTPTPTTPMAGGGEACAGSSPDDCSSSAASVSPLVGSQQDEPCFSGGDWMDDVRALASFLESDEEWLRCQQTAEEQLA

SEQ ID NO: 10829 - protein, 168 aa, Zea mays
  unsure (1)..(168): unsure at all Xaa locations
MKKIFGAKKDKGPPPSIQDATERINKRGETVDEKIKKLDEELARYKEQIRKTRPGPSQEAIKXYEEQRNMLYNQTYNLDQVGFAADGLKDAQQTMNAMKAANKELKGMMKTVKIDEIDNMQDEMTDLMDVSNEIQETLGRSYNIPDDVDEEELMGELDALESDMEFDS

SEQ ID NO: 10830 - protein, 222 aa, Zea mays
  unsure (1)..(222): unsure at all Xaa locations
MAAAAEVVLLDFWVSPFGQRCRIALAEKGVAYEYREXDLLDKGELLLRSNPIHKKIPVLLHAGRPVCESLVILQYIDEAWPDVAPLLPKDDPYARAQARFWADYIDKKIYDSQTRLWKFEGEAREQAKKDLVEVLETLEGELADKPFFGGGALGFVDVALVPFTSWFLAYEKLGGFSIQEHCPRIVAWAARCRERESVAKALSDPAKVLGFVQFLQSKFGAK

SEQ ID NO: 10831 - protein, 472 aa, Triticum aestivum
  unsure (1)..(472): unsure at all Xaa locations
MAARKDNAVLIACQAPNGRVTRAQAANRGRFGVPHPAPVPVRTERKPATKGKAKRGASDENTCASALTSAPPPKRRAALKDVTNISCANSFRNCTAVTKLQSRPTQKVGRNPSKNKQCTKKAPKPPLPAVSGTSFVVNDSHNVEESQKAELLPPKEEPTALLENKGSLSLWNIARNRESGVHEPFFQGRNTRDKSETADSNTGYYVGLNVIDIDKDNGNPQMCASYAAEIYRNLMAAELIRRPKSNYMETLQRDITKGMRGILIDWLVEVSEEYKLVPDTLYLTVYLIDQFLSRKYIERQKLQLLGITSMLIASKYEEICAPRVEEFCFITDNTYTKNQVLKMECEVLNDLGFHLSVPTIKTFLRRFLRAAHASQKAPCATLGYLGNYLAXELTLTDYSFLKFHPSVVAASAVFLAKWTLDQSDLPWNSTLEHYTSYKSSDIQGCVRDLWELQQGNTSGSPPLNAIREKYRQ

SEQ ID NO: 10832 - protein, 269 aa, Bradyrhizobium japonicum USDA 110
MMSAKDAIMGSGARGGASPMPTIPFFKHATLREIIITRLCCAADAVVVLCCAIYLVGCYHAAGLRWPWLIVALLIGYFLADFFSGLVHWAVDTWLDEGGLGRGIAMTREHHTHPSHVLLYEFLDQASLGAAPSAVVVGISAAITALFPVSALTYALMIVWFVIATCMLFGMSFHNLAHWRVRPPLLRMAQRLHLVCSPEHHLRHHRDHTVRYCVINGWANYPCDSLRLWSRLERLVTATTGRTPRADDAEWQRKLNDTGIFVETPRPAG

SEQ ID NO: 10833 - protein, 455 aa, Betula pendula
MASWVLSECGLKPLPQVFPRPRAGPISYKPSKIRFLHSNETGTDLKFHSKRVSSGCLRERNWGLKVSAPWRVASVEGEEEREERINGVNGFKEEEEPGFDPGAPPPFNLSNIRAAIPKHCWVKDPWRSVSYVVRDVVVVFALAAAAVYLNKWFVWPLYWAAQGTMFWALFVLGHDCGHGSFSNNHKLNSVVGHLLHSSILVPYHGWRISHRTHHQNHGHVENDESWHPLPERIYKNLDNLTKSFRFNAPFPLFAYPFYLWGRSPGKTGSHFDPNSDLFVPNERKDVITSTVCWTAMAALLVGLGFVMGPGQLLKLYGVPYWVFVMWLDLVTYLHHHGHGDKLPWYRGKEWSYLRGGLTTIDRDYGLINNIHHDIGTHVIHHLFPQIPHYHLIEATEAAKPVLGKYYREPQKSLPLPFHLIGSLIRSLKQDHYVSDSGDVVYYRTDPKISGSSKLK

SEQ ID NO: 10834 - protein, 342 aa, Agrobacterium tumefaciens str. C58 (Cereon)
MTSKELNGYAGGQLLTCGKVSNRSIPVEKRSLGRTGLSIAPIVFGGNVFGWTADEKTSFALLDAFFDVGFNAIDTADVYSAWVDGHVGGESEAIIGKWLKQSSVKREDAVIVTKVGFDNRGQKTGLSAKWIAEAVEASLKRLQTDYIDLYLAHKPDPEVPLEETLAAFAKLKEQGKIRAIGCSNYSASQLQEALDVATKNNLPRYDVLQPEYNLYNRADFEGPIADLCVKEEIGVINYYSLAAGFLTGKYRAKADTEGVARSYRVGDYVNTRGLAVLGAMDAVAVQTGAKLADIALAWLLRKKAVTAPIASATSLSQLESFKRAVDLKLTDEMMTLLDKAGA

SEQ ID NO: 10835 - protein, 305 aa, Miscanthus transmorrisonensis
IESVGEGVTDVAPGDHVLPVFTGERKECPHCKSAESNMCDLLMINTDRGVMIGDGKSRFSINGKPIYHFVGTSTFSEYTVMHVGCVAKINPQAPLDKVCVLSCGISTGLGASINVAKPPKGSTVAIFGLGAVGLAAAEGARIAGASRIIGVDLNPSRFEEARKFGCTEFVNPKDHKKPVQEVLAEMTNGGVDRSVECTGNINAMIQAFECVHDGWGVAVLVGVPHKDAEFKTHPMNFLNERTLKGTFFGNFKPRTDLPNVVELYMKKELEVEKFITHSIPFAEINKAFDLMAKGEGIRCIIRMEN

SEQ ID NO: 10836 - protein, 609 aa, Saccharomyces pastorianus
MPLSEDFGSSGKKETSPDSISVRSFSAGNNLQSLTSEKSYSRDSTGNDKLIHRFVDSFKRAESSTTKTKQINKNTSDLEEDVHSFTSDSDLKKSMKSRHVVMMSLGTGIGTGLLVANAKGLHYGGPAALVIGYVLVSFVTYFMIQAAGEMAVTYPTLPANFNAYSSIFVSKPFGFATVWLYCFQWLTVLPLELITASMTVQFWNDKINADIFILIFFVFLLFVHFFGVKAYGETEFIFNCCKILMIAGFIILSVVINCGGAGNDGYIGGKYWRNPGAFAGDSSASRFKNICYILVTAYFSFGGMELFALSVQEQENPRKSTPVAAKRSIYRILIIYLLTMILIGFNVPYNDDQLMGSGGSATHASPYVLAASIHGVKVVPHIINAVILISVISVSNSSLYAGPRLMCSLAQQGYAPKFLDYIDREGRPLRALIVCSIFGTVAFVAASSKEEVVFTWLAAIAGLSELFTWTSIMLSHFRFRQAMKVQGRSLDELGYKATSGIWGSAYGVFFNILVFIAQFWVALAPLGNGGKCSVESFFESYLAAPIWLAFYLGYMIYNRDFTFLNPLDKIDLDFHRRVYDPELMRQEDLENKEKKKHMPLMKKAYLFWC

SEQ ID NO: 10837 - protein, 196 aa, Oryza sativa
MSRSSLAMALLLAAFAAAATANSGAAPAASDFIRKSCRATQYPAVCVQSLASYGGAAPRSPRELARAALSVSVDKARSASTYVGHICGPGGGRGGAVGAGPVRDCLENMADSVGHLRDAAQELGDMGHAGSPGFKWHLSNVQTWCSAALTDENTCLDGLSRGVDAATRSAIRGKIVEVAQVTSNALALVNRVAPAN

SEQ ID NO: 10838 - protein, 142 aa, Triticum aestivum; identical to SEQ ID NO: 7510

SEQ ID NO: 10839 - protein, 341 aa, Rhodopseudomonas palustris
MPKGQRIVLASRPVGEPTPQNFRLEEFDVPAPGEGQVLLRTIWLSLDPYMRGRMSDGPSYAQPVPVGGVMEGGTVCEVIDSKSPGFAKGDIVLAHSGWATHAIADAKPLRKIDPALGPISTAVGVLGMPGMTAYTGLLDIGQPKEGETVVVAAASGAVGSAVGQIAKVKGARAIGIAGGKDKCDYVKQELGFDDCLDHRDPDLAAKLKAACPNGIDVYFENVGGEVFEAVFPLLNAFARIPVCGLIAQYNAFETPPTPKWATALMRHVLTKRLTIRGFIVSDFAGRRQEFLREMSGWVRDGKVKYREHVTDGLENAPEAFMGLLKGANFGKQLVRVGPERA

SEQ ID NO: 10840 - protein, 633 aa, Oryza sativa
  unsure (1)..(633): unsure at all Xaa locations
MNLWTDDNASMMEAFMASADLPAFPWGAASTPPPPPPPPHHHHQQQQQQVLPPPAAAPAAAAFNQDTLQQRLQSIIEGSRETWTYAIFWQSSIDVSTGASLLGWGDGYYKGCDDDKRKQRSSTPAAAAEQEHRKRVLRELNSLIAGAGAAPDEAVEEEVTDTEWFFLVSMTQSFPSGVGLPGQALFAASPXWIAXGLSSAPCDRARQAYTFGLRTMVCLPLATGVLELGSTDVIFQTGDSIPRIRALFNLSAAAASSWPPHPDAASADPSVLWLADAPPMDMKDSISAADISVSKPPPPPPHQIQHFENGSTSTLTENPSPSVHAPTPSQAQQGPFRRELNFSDFAKPETGEILNFGNDSSSGRRNPSPAPPAATASLTTAPGSLFSQHXANEGMLSFSSAPTTRPSTGTGAPAKSESDHSDLEASVREVESSRVVAPPPEAEKRPRKRGRKPANGREEPLNHVEAERQRREKLNQRFYALRAVVPNVSKMDKASLLGDAISYINELRGKLTALETDKETLQSQMESLKKERDARPPAPSGGGGDGGARCHAVEIEAKILGLEAMIRVQCHKRNHPAARLMTALRELDLDVYHASVSVVKDLMIQQVAVKMASRVYSQDQLNAALYTRIAEPG

SEQ ID NO: 10841 - protein, 201 aa, Glycine max
PDWYVIWNHQLWKVLRISCSFYYLVASSACFVHIMKIQVLAEREQKIQTEVQEIRKVFYCDLCNKQYKLAMEFEAHLSSYDHNHRKRFKQMKEMHGSSSRDDRQKREQQRQEREMAKFAQIADAQKQQRLQLQQESGSATVPSESKTATALTDQEQRNTLKFGFSSKGSGSKITFGAKKQNVAKKQNVPISSIFSNDSDED

SEQ ID NO: 10842 - protein, 394 aa, Olyra latifolia
EPARTEDPALSIAGAVQSQKLAVRAISRLQALPGGDVKLLCDTVVEHVRELTGYDRVMVYRFHEDEHGEVVAESRRADLEPYLGLHYPATDIPQASRFLFRQNRVRMIADCHAAPVKVIQDSALQQPLCLVGSMLRAPHGCHAQYMANMGSIASLVMAVIISSGGDDEHNITRGGIPSAMKLWGLVVCHHTSPRCIPFPLRYACEFLMQAFGLRLNMELQLAHQLSEKHILRTQTLLCDMLLRDSPTGIVTQSPSIMDLVKCDGDALYYHGKYYPLGVTPTEVQIKDIIEWLTVCHGDSTGLSTDSLADAGYPGAAALGDAVCGMAVAYITPSDYMFWFRSHTAKEIKWGGAKHHPEDKDDGQRMHPRSSFKAFLEVVKSRSLPWENAEMDAIH

SEQ ID NO: 10843 - protein, 954 aa, Streptomyces avermitilis MA-4680
MTAQTPPTPSFRDPRLPFAKRVDDLLARLTLDERIAFLHQFTPAVERLGIAAFRTGQEALHGVAWMGPATVFPQAVGLGATWNDDLVRRIGEAVSAETRAMRARDDRVGLNVWSPTVNLLRHPLWGRGEEGYSEDPRLTSAIATAYTRGLRGDHPTYWRTAPVLKHWLAHNNETNRDTTSSSVRPRVLHEYDLRAFRETVEAGAVAGVMPAYNLVNGRPNHVSPYLREHLRTWTDQELLVCSDAGAPSNLVDSEHYFDTHEEATAAAVLAGVDSFTDHGTDSSKIVERVRGALVQGLLSEADIDEAVRRQLAIRFRLGEFDPRLDPYAGTLDFDTAAHRALARESAEQAVVLLKNEGLLPLGPEVRIAAVGLLADECKLDWYSGTLLHRSTPLEGLYERFGADRVNFAEGVDRVRLRTSSGAFLRVPVAENAAEVTADEARGAEGALDPALLAGRTDLPPLTTDAVGSELALIDWGEGVLTLRAPDGRYLSVADDGYVRASADQPGGWVVQETFRLEPSESHDNGHLLKHTGTGRYVCVAADGVKVAAQEPRDAEIFELESTERGEDAVTRVAAAADVVLVFAGNDPHINGRETEDRTTLRLPAHQERLLRAARAANPATALVLVSAYPYAVDHADLPAALWTAHGGQAAGTALARVLSGDVSPAGRLPQTWYADDADLPGLLDYDVIGSRQTYLYFEGTPLFPFGHGLSYASFAYEGLEHRTDEDTVRVSFTVTNTGSRAADEVAQLYIRAVDPSVPRPRRELAAHRRLRLAPGASAELAFALPSAAFAFWDVAHGRRRVEPGSYELLVGASSEDIRLRTTIELTGEAAAPRAVRALGLKAADFDDQRNTEIVDRTKVSGDAVTPLDGGTGELVFRACDFGAGVSGVSADLAGEGVVEISLAGGPPPAVLTLPPTKGPYDYTTVTAAFAADGVHDVHLRLRGPLRLAQVGFSG

SEQ ID NO: 10844 - protein, 245 aa, Agrobacterium tumefaciens str. C58 (Cereon)
MLDLTGRKALVTGATGGIGEEIARLLHKQGATVGLHGTRVEKLEALAAELGDRVKIFPANLADRAEVKALGEKAEAELEGVDILVNNAGITKDGLFVRMSDEDWDNVIEVNLTAMFRLTRELTHPMMRRRFGRIINITSIVGVTGNPGQANYCASKAGMIGFSKSLAQEIATRNVTVNCVAPGFIESAMTGKLNDKQKDAIMGAIPMKRMGTGAEVASAVLYLASNEAAYMTGQTLHVNGGMAMI

SEQ ID NO: 10845 - protein, 336 aa, Yersinia enterocolitica
MTILVTGGAGYIGSHTVLTLLENGEDVVVLDNLSNASAESLLRVSKITGRTPVFYQGDILDRNCLKKIFFEHKIDSVIHFAGLKSVGESVVKPIEYYQNNVTGSIILLEEMVISGVKKLIFSSSATVYGDPEFVPLTEDARIGGTTNPYGSSKVMIEQILKDFAFAYPDFSIRALRYFNPVGAHISGLIGEDPNGKPNNLLPFITQVAIGKLPKLAVYGNDYPTVDGSGVRDYIHVMDLAEGHLCALNNLTHGFKVYNLGSGIGHSVLEMIAEFELISGKKIPYEIVARRPGDIAECWASPELAFKELKWKAKRNLTYMLKHAWNWQQSNPNGYVR

SEQ ID NO: 10846 - protein, 39 aa, Triticum aestivum
LAVTLAVVRMYLGWAYVGNRLLSATVEYEETGWYDGQML

SEQ ID NO: 10847 - protein, 219 aa, Pyrus communis
GKLRSNFLGTKFTIFDGQPSHSGARIAKSRSTRLVNLKQETPRVPAGNYPVAQIQYELNMLGSRGPRRMQCTMDSIPSSSIEPGGVAPTQAEFSHNNAELFPSLSFNRSKSNRMESFLSGPLARQKDGVLVLRNKSPRWHEQLQCWCLNFHGRVTVASVRLSVGGFSGNGPPGPEHEKIILQFGKVGKDQFTMDYRYPISAFQAFSICLSSFDTKIACE

SEQ ID NO: 10848 - protein, 196 aa, Oryza sativa (japonica cultivar-group)
MSMPEAGRSERDGREQDDDYEQQQARVLMALMQGFCAARYRKADNIPCPIVQGLYLGSVGAAMNKDALKSLNITHILIVARSLNPAFAAEFNYKKIEVLDSPDIDLAKHFDECFSFIDESISSGGNVLVHCFAGRSRSVTIIVAYLMKKHQMSLENALSLVRSKRPQVAPNEGFMSQLENFEKSMQGKIQIAFFTK

SEQ ID NO: 10849 - protein, 462 aa, Deinococcus radiodurans
MMRKTALLGLLTLGLASAGGAQPATPLSATAALRDGAGQVVGSARFVQQGAGVQVTVDVRGLTPGMHGMHVHEFGRCTPGVDPAVNKVVPFGAAGGHFDPSMSRNHDTPQTDNKHGHGGDTPMLSVGADGVGKASFTSTKISLTGENGILNRSLVIHANPDDYKTDPAGMSGARERCGVIVRDGLSVRDYALPGPVDHPEGVAYDAKKGLIYTGSAQNGTIYAINAQSGAVTKFQEGGAYGRQVALGLKVDPQGRLWIAGGAQGTVSILTPDGMTLAVLETPKSPRPYINDLVLAPDGNFYVTDSSRPVIFRVDKALKLTAWLDLAGTPIKYGPGVNLNGIAATPDGKYLLAVQLNTGELWRIDLKTKAVKKVMDGLVNGDGLLLDGRTLYVARNKDQVVAKVSLSADYGSGQLVAQEPLNGLRFPATLAKVGNDLVVTQAQLDRIGGTPETPFKLTRFAKF

SEQ ID NO: 10850 - protein, 751 aa, Geobacillus stearothermophilus
MENQNRQNAAQCPFHGSVTNQSSNRTTNKDWWPNQLNLSILHQHDRKTNPHDEEFNYAEEFQKLDYWALKEDLRKLMTESQDWWPADYGHYGPLFIRMAWHSAGTYRTGDGRGGASTGTQRFAPLNSWPNNANLDKARRLLWPIKKKYGNKISWADLFILAGNVAIESMGGKTIGFGGGRVDVWHPEEDVYWGSEKEWLASERYSGDRELENPLAAVQMGLTYVNPEGPDGKPDPKAAARDIRETFRRMGMNDEETVALIAGGHTFGKAHGAGPATHVGPEPEAAPIEAQGLGWISSYGKGKGSDTITSGIEGAWTPTPTQWDTSYFDMLFGYDWWLTKSPAGAWQWMAVDPDEKDLAPDAEDPSKKVPTMMMTTDLALRFDPEYEKIARRFHQNPEEFAEAFARAWFKLTHRDMGPKTRYLGPEVPKEDFIWQDPIPEVDYELTEAEIEEIKAKILNSGLTVSELVKTAWASASTFRNSDKRGGANGARIRLAPQKDWEVNEPERLAKVLSVYEDIQRELPKKVSIADLIVLGGSAAVEKAARDAGFDVKVPFFPGRGDATQEQTDVESFAVLEPFADGFRNYQKQEYSVPPEELLVDKAQLLGLTAPEMTVLVGGLRVLGANYRDLPHGVFTDRIGVLTNDFFVNLLDMNYEWVPTDSGIYEIRDRKTGEVRWTATRVDLIFGSNSILRSYAEFYAQDDNQEKFVRDFINAWVKVMNADRFDLVKKARESVTALQNIHGPRSGKKVNLQ

SEQ ID NO: 10851 - protein, 369 aa, Zea mays
MEAIRKQASKLREQVARQQQAVMKQFGGGYGADGVFADEAEAQQHSKLEKLYISTRAAKHFQRDIVRGVEGYIVTGSKQVEIGNKLCEDGKKYGTENTCTSGSTLSKAALSFAKARSMMEKERGNLLKALGTQVAEPLRAMVMGAPLEDARHLAQRYDRMRQEAEAQAIEVSKRQMKLREASGNSDMISRLEAAESKLQELKSNMGVLGKEALAAMTAVEGQQQRLTLQRLIALVESERNYHQKVLQILDQLEREMVSERQRIEGAPPPVVESSMPPPPAYEEVNGIFMRNTVAELVETVEYFLAEAIQSYRAESDTELNLSAGDYIVVRKVSNNGWAEGECRGRAGWFPYDYIEKRERVLASKVAQVF

SEQ ID NO: 10852 - protein, 500 aa, Citrus sinensis
LLLIPLLLILKKLKAQNKQQLPPSPPKLPVIGNFHQLGELPHQSLWQLSKKYGPVMLLKLGRVPLVVISSAEAARDVLKVHDLDCCSRPPLIGSGKFTYNYSDIAFSPYSDYWRELRKISVLEVFSLRRVQSFGFIREEEVALLMNSISESSSSASPVDLSEKMFALTGSIVFRMAFGRRFRGSNFDNHSFQELVHAVESLLGGFAAAECFPYVGWIIDRLNGYHAKLERVFQELDTLFQQIIDDHLKPAETTKQEHVQQDIIDVMLKIERDQAESHESEAWLTKNHIKAVLLNIFLGGVDTSAITVIWAMAELCKNPRLMKKAQAEIRNHIGNKGRVTEADIDQLQYLKMVIKETLRLHPPAPLLIARDTLYRFKVNGYDIYPKTLIQVNAWAIGRDSKYWESPEEFIPERFIDKPVDVKGQDFEYLPFGSGRRICPGINLGLIMSELALANLLYCFDWKLPNGREEDCVNMNMEEATGVSLTLSKKTPLILVPVNYLQ

SEQ ID NO: 10853 - protein, 147 aa, Zea mays
  unsure (1)..(147): unsure at all Xaa locations
MASLDAVRGDLALLILYLNKAEARDKICRAIQYGSKFISNGEPGPAQNVDKSTSLARKVFRLCKFVNDLHALISPPAKGTPLPLILLGKSKNAMLSTFLFLDQIVWAXGRTGIYKNRXRAEFLEXIAFYCFLGSNTFTIIIELAELQ

SEQ ID NO: 10854 - protein, 364 aa, Xanthomonas campestris pv. campestris str. ATCC 33913
MAAATLATDGPYAHVAAFCQRFGLRVPILLSPMAGACPVPLSAAVAAAGGMGAMGAVLSQPQDIVAWVQAFRQASDGPAQINLWIPDPAPDRDADAEARMRAFLEQWGPAVAADAGDATPAGFDAQFDALVEARPAVASSIMGVFRPDQVSRLKSAGIAWFACATTLEEARAAQAAGADAVVAQGAEAGGHRGAFDASQAERQMTGLFALLPRLVDHLEIPVIAAGGIADARGIAAALTLGASAVQIGTGLLRTPEAALPGAWANALAATEPEQTWPTRAFSGRLGRSIATAYVRAAAAVDAPPPAPYPVQRALTAVMRQAAARENRLDALQAWAGQSAWMAPAQPAADLVTQWWAQAQARVCR

SEQ ID NO: 10855 - protein, 346 aa, Escherichia coli K12
MVWLANPERYGQMQYRYCGKSGLRLPALSLGLWHNFGHVNALESQRAILRKAFDLGITHFDLANNYGPPPGSAEENFGRLLREDFAAYRDELIISTKAGYDMWPGPYGSGGSRKYLLASLDQSLKRMGLEYVDIFYSHRVDENTPMEETASALAHAVQSGKALYVGISSYSPERTQKMVELLREWKIPLLIHQPSYNLLNRWVDKSGLLDTLQNNGVGCIAFTPLAQGLLTGKYLNGIPQDSRMHREGNKVRGLTPKMLTEANLNSLRLLNEMAQQRGQSMAQMALSWLLKDDRVTSVLIGASRAEQLEENVQALNNLTFSTKELAQIDQHIADGELNLWQASSDK

SEQ ID NO: 10856 - protein, 751 aa, Geobacillus stearothermophilus
MENQNRQNAAQCPFHGSVTNQSSNRTTNKDWWPNQLNLSILHQHDRKTNPHDEEFNYAEEFQKLDYWALKEDLRKLMTESQDWWPADYGHYGPLFIRMAWHSAGTYRIGDGRGGASTGTQRFAPLNSWPDNANLDKARRLLWPIKKKYGNKISWADLFILAGNVAIESMGGKTIGFGGGRVDVWHPEEDVYWGSEKEWLASERYSGDRELENPLAAVQMGLIYVNPEGPDGKPDPKAAARDIRETFRRMGMNDEETVALIAGGHTFGKAHGAGPATHVGPEPEAAPIEAQGLGWISSYGKGKGSDTITSGIEGAWTPTPTQWDTSYFDMLFGYDWWLTKSPAGAWQWMAVDPDEKDLAPDAEDPSKKVPTMMMTTDLALRFDPEYEKIARRFHQNPEEFAEAFARAWFKLTHRDMGPKTRYLGPEVPKEDFIWQDPIPEVDYELTEAEIEEIKAKILNSGLTVSELVKTAWASASTFRNSDKRGGANGARIRLAPQKDWEVNEPERLAKVLSVYEDIQRELPKKVSIADLIVLGGSAAVEKAARDAGFDVKVPFFPGRGDATQEQTDVESFAVLEPFADGFRNYQKQEYSVPPEELLVDKAQLLGLTAPEMTVLVGGLRVLGANYRDLPHGVFTDRIGVLTNDFFVNLLDMNYEWVPTDSGIYEIRDRKTGEVRWTATRVDLIFGSNSILRSYAEFYAQDDNQEKFVRDFINAWVKVMNADRFDLVKKARESVTALQIDDYNRSKDNINLQ

SEQ ID NO: 10857 - protein, 177 aa, Shewanella oneidensis MR-1
MMKFPLFILTSLMSTSVFAATCPSYLDVEVRKLHSEQSVNLCELTQGKPVLLINTASNCGYTSQFKALEALHKEYKDKGLVVIGFPSDDFFQEENDEKDTAKVCYINYGVTFTMLATSPVRGSDVNSVFKYLGDKAGAPKWNFYKYVVSGDGNTVMQFNSKVKPDSTELKQAIESVL

SEQ ID NO: 10858 - protein, 319 aa, Staphylococcus epidermidis ATCC 12228
MRRLFAIGEALIDFIPNVTHSKLKDVEQFSRQVGGAPCNVAATVSKLGGKSEMITQLGNDAFGDIIVETIEQLGVGTQYIKRTNKANTALAFVSLQDDGQRDFSFYRKPSADMLYQPENIDDIQVFQDDILHFCSVDLIESDMKYAHEKMIEKFESVDGTIVFDPNVRLPLWEDKLECQRTINAFIPKAHIVKISDEELLFITGKRNEDEAIQSLFRGRVNVVIYTQGAQGATIYTKDDYRIHHEGYQVQAIDTTGAGDAFIGAIIYCILESRYSECKDLFKEKGKDILAFSNRVAALTTTKHGAIESLPTKEDIKDYN

SEQ ID NO: 10859 - protein, 204 aa, Bacillus cereus
  unsure (1)..(204): unsure at all Xaa locations
EKIRKKLLEDSESKTLKKRWAHFDLTMLGIGAIIGQEYLVLTGLVASRDAGPXSIFSFMIAAIVCGFAALCYAEIASTLPVSGSVYTYSYATIGEFVAHLMGWTLLSVYIVTTAAVAGGWTGYFHNLLNGFGFEIPRSLLTIPTQGGIVNLPAVIITLLLTWLLSKGTKESKRVNNAMVLIKIGIVVLFISVGIFYVKPENWID

SEQ ID NO: 10860 - protein, 215 aa, Zea mays
MASGEGTGDSNAAGAGMEVPEVELCLDLTSCQLHDLSEVEIPPTLEELDLTANRLTAVDPRIGHLPRLRKLSFRQNLLDDDAVAPLFTWDAIAGLQEIVLRDNKLIKIPDASIFKGLLVFDVSFNELSSLNGLSKVSSTVKELYFSKNEVPKMEELEHFHALELLELGSNRLRVMENLETLTNLQELWLGRNRIRTINLCGLKSIKKISLQSNRL

SEQ ID NO: 10861 - protein, 290 aa, Oryza sativa
  unsure (1)..(290): unsure at all Xaa locations
XTLEFWAWGAVFVASFAVAYVNPTALGTTARTCLPFLLASTVLGYMVGSGIPSGVKKVLHPIICCALSADLAAIAYGYLSRSGADAVLGDYLTESPSNPGAGDILMGFLGSVIISFAFSMFNQRKLVRRHAAEIFTSIAVASTFSLYSTAILGRVVELEPILTISILPRCITVALALRVVSLFEGVNTSVXTAAVVVLTGLIGANFAQAVMDKLRLKDPIARGIGTASSAHGLGTATVSAKEPEALPFCAIAYALTGVVASLFCSLPAIRHSLVFIAGDASASQTQHFSY

SEQ ID NO: 10862 - protein, 351 aa, Glycine max; identical to SEQ ID NO: 1980

SEQ ID NO: 10863 - protein, 273 aa, Streptomyces exfoliatus [sequence omitted]

SEQ ID NO: 10864 - protein, 296 aa, Triticum aestivum
  unsure (1)..(296): unsure at all Xaa locations
MARWAIAIHGGAGVDPNLPEHRQEEAKRVLARCLQVGVDLLRAGATALDVVEAVVRELETDPCFNSGRGSALTRAGTVEMEASIMDGRGRRCGAVSGXVPPLKTPVSLARRVMAQGSPHXYPAFGRRRRILRRDHGPGGLAAPVEGRGGGGMVGGGLPVSGAAPVPGGCAVADSGGFTAAATSTGGLMNKMTGRIGDSPLIGAGTYACGHCAVSCTGEGEAIIRSTLARDVAAVMEYKGLPLQEAVDFCVKERLDEGFAGLIAVSGTGEVAYGFNCTGMFRGCATEDGFMEVGIWD

SEQ ID NO: 10865 - protein, 364 aa, Glycine max
MGKGGMSIDEHGEGKEENMAAWLVGMNTLKIQPFKLPTLGPHDVRVRMKAVGICGSDVHYLKTLRCAHFIVKEPMVIGHECAGIIEEVGSQVKSLVPGDRVAIEPGISCWHCNHCKHGRYNLCDDMKFFATPPVHGSLANQIVHPADLCFKLPDNVSLEEGAMCEPLSVGVHACRRANIGPETNVLIMGAGPIGLVTMLAARAFGAPKTVIVDVDDHRLSVAKSLGADDIIKVSTNIKDVAEEVVQIQKVMGAGIDVTFDCAGFDKTMSTALSATQPGGKVCLVGMGHSEMTVPLTPAAAREVDVVGVFRYMNTWPLCLEFLRSGKIDVKPLITHRFGFSQKEVEEAFETSARGGNAIKVMFNL

SEQ ID NO: 10866 - protein, 394 aa, Pseudosasa japonica
EPARTEDPALSIAGAVQSQKLAVRAISRLQALPGGDVKLLCDTVVEHVRELTGYDRVMVYRFHDDEHGEVVAESRRADLEPYLGLHYPATDIPQASRFLFGQNRVRMIADCRAAPVGVIQDPVLPQPLCLVGSTLRAPHGCHAQYMANMGSIASLVMAVIISSGGDDENNITRGGIPSAMKLWGLVVCHHTSPRCIPFPLRYACEFLMQAFGLQLNMELQLAHQLSEKHILRTQTLLCDMLLRDSPTGMVTQSPSIMDLVKCDGAALYYHGKYFLLDVTPTEAQIKDIIEWLTMCHGDSTGLSTDSLADAGYPGAAALGDAVYGMAVAYITPTDYLFWFRSHTAKEIKWGGAKHHPDDKDDGQRMHPRSSFKAFLEVVKSRSLPWENAEMDAIH

SEQ ID NO: 10867 - protein, 357 aa, Prochlorococcus marinus subsp. pastoris str. CCMP1378
MKRYKVVLLSGDGIGPEISEISITILKKLSKKYGFNLDIKEEYFGGIAYEKHNDPAPKETLDQCKASDAVLLACVGDVKYDTLPRELRPESGLLKLREALNLFANIRPVKIRKSLLDSSSFKKEVIENVDLIVVRELIGGIYFGQPRGEITQTKIKKAFNTMVYDSNEIERITEVAIKIANQRSKKICSVDKSNVLEVSQLWRDTVSLVASKENDLALSNMYVDNAAMQLVKDPGQFDVILTSNLFGDILSDLAAMITGSIGMLPSASLSNSGPGVFEPVHGSAPDIAGKNIANPIAMALSTSMMLKIGLNEIEAADDIEIAIDNVLSKGYRTSDLDNGNCQVLSCSEIGEKIIQEI

SEQ ID NO: 10868 - protein, 465 aa, Sarcandra glabra
SGKPFYAIMHRIDVGPVIDLEPVNPADVPVTAAGALKSYKLAAKAISRLQSLPSGNISLLCDVLVREVSELMGYDRVMAYKFHEDEHGEVIAECRRSDLEPYLGLHYPATDIPQASRFLFMKNKVRMICDCSAAPVKVIQDKRLGQPMSLCGSALRAPHGCHAQYMANMGSIASLVMSVTINEDDDETESDPQQQQEKPRKLWGLVVCHHTGPRFVPFPLRYACEFLIQVFGIQLNKEVELAAQLREKHMLKTQTVLCDMLLRDAPMRIVTQSPNVMDLVKCDGAALYYRNQFWLLGTTPTEAQIRDIAEWLLDYHDGSTGLSTDSLMEAGYPGASVLGDAVCGMAAVKITSKDFLFWFRSHSAKEIKWGGAKHDPINKDDDGRKMHPRSSFKAFLEVMKQRSLRWEDVEMDAIHSLQLILRGSLQEESENDSKAIVNASLDVAKIQGMDELRFVTNEMVRLIET

SEQ ID NO: 10869 - protein, 499 aa, Solanum melongena
IFTAFSLLFSLFIFLLTRKPKSKTPNLPPGPPGWPIVGNLFQVAGSGKQFFEYIRDLKPKYGSIFTLKMGSRTMIIVASAELAHEALIQKGQIFASRPRENPTRTIFSCNKFSVNAAVYGPVWRSLRRNMVQNMLSPSRLKEFREFREIAMDKLIERIRVDAKENNDVVWALKNARFAVFYILVAMCFGVEMDNEEMIERVDQMMKDVLIVLDPRIDDFLPILRFFVGYKQRKRVNEVRKRQIETLVPLIEKRRSVVQNPGSDKTAASFSYLDTLFDVKVEGRKSGPTNAELVTLCSEFLNGGTDTTATALEWGIGRLMENPTIQNQLYQEIKTIVGDKKVDENDIEKMPYLNAVVKELLRKHPPTYFTLTHSVTEPVKLAGYDIPMDTNVEFFVHGISHDPNVWSDPEKFDPDRFLSGREDADITGVKEVKMMPFGVGRRICPGLGMATVHVNLMLARMVQEFEWFAYPGNNKVDFSEKLEFTVVMKNPLRAKVKLRI

SEQ ID NO: 10870 - protein, 665 aa, Colletotrichum trifolii
MDNNNNRLYLNIGNNNDRLGPGSDRQYPTTPSTFPQPVFPHQGQQQQQQQQQQLHHQQQPGMQHPQQYQAQQQQQQQQQQQQQQPYQTGYAPSGYFNPNQQAAQYPPQGHGDYNAAYQPRSNTPGTNDPNVGLAHQFSHQNLGGAARASPYGSRGPSPGQRPRTAGASGQPPSGYGHYATPPLPNQQPASVDPFAPAPERNYEKYGPNANGNQKKCTQLASDFFKDSVKRARERNQRQSEMEAKLSEPNQSQSRREQIWSTAGRKEGQYLRFLRTKDKPENYNTVKIIGKGAFGEVKLVQKKGDGKVYAMKSLIKTEMFKKDQLAHVRSERDILAESDSPWVVKLYTTFQDSYFLYMLMEFLPGGDLMTMLIKYEIFSEDITRFYIAEIVLAIEAVHKLGFIHRDIKPDNILLDRGGHVKLTDFGLSTGFNRLHDNNYYQQLLQGRSNKPRDRNSVAIDQINLTVSNRSQINDWRRSRRLMAYSTVGTPDYIAPEIFTGHGYTFDCDWWSLGTIMFECLVGWPPFCAEDSHDTYRKIVNWRQTLYFPDDIQLGVEAENLIRSLICNTENRLGRSGAHEIKAHSFFRGVEFDSLRRIRAPFEPRLTSAIDTTYFPTDEIDQTDNATVLKAQAIQQARSGIPQVEESPEMSLPFIGYTFKRFDNNFR

SEQ ID NO: 10871 - protein, 394 aa, Triticum aestivum
MPPKASKKDAEPAERPILGRFSSHLKIGIVGLPNVGKSTFFNIVTKLSIPAENFPFCTIEPNEARVHVPDERFDYLCQLFKPKSEVAAYLEINDIAGLVRGASAGEGLGNAFLSHIRAVDGIFHVLRAFEDTEITHIDDTVDPVRDLETISQELRLKDIEFVQAKIDDLEKSMKRSNDKQLKIDHELCQRVMTHLQDGKDVRLGEWKAAEIEILNAFQLLTAKPVVYLVNMSEKDYLRKKNKFLPKIHAWVKEHGGETIIPFSCAFEQKLVDMPEDEAAKYCAENQTASLIPKIIKTGFAAIHLIYFFTAGHDEVKCWQIRRQSKAPQAAGAIHTDFERGFICAEVMKFEDLKELGSESAVKAAGKYRQEGKTYVVQDGDIIFFKFNVSGGGKK

SEQ ID NO: 10872 - protein, 325 aa, Caulobacter crescentus CB15
MAIKTRFTELFGVEHPIAQGGMQWVGKAELVSAVANAGALGFLTALTQPTPEALSKEIARTREMTDKPFGVNLTILPAMTPPPYAEYRAAIIESGIKIVETAGYKPQEHVDHFKANGVKVIHKCTAVRHALSAERMGVDAISIDGFECAGHPGEDDIPGLILIAAAADKVKIPMLASGGIADARGLVAALALGADGVNMGTRFCVTQEAPIPMAFKEQMVANDERQTDLIFRTLHNTARVMRNAVSQEVVQIERAGGAKFEDVAHLVAGTRGRDALAQGDTDGGIWSAGMVQGLIHDIPTVKDLVDRMVAEAEDLIRGRLARMLG

SEQ ID NO: 10873 - protein, 285 aa, Zea mays
MAKNYPTVSAEYSEAVDKARRKLRALIAEKSCAPLMLRLAWHSAGTFDVSSRTGGPFGTMKHQSELAHGANAGLDIAVRLLEPIKEEFPILSYADFYQLAGVVAVEVTGGPEIPFHPGREIPLTVSDNHFFMTRDFIAAGNLCFPDKPQPPPEGRLPDATKGSDHLRQVFGKQMGLSDQDIVALSGGHTLVCYCHSCLFQGRCHKERSGFEGAWTTNPLVFDNSYFKELLSGDKEGLLQLPSDKALLSDPVFRPLVEKYAADEKAFFDDYKEAHLKLSELGFADA

SEQ ID NO: 10874 - protein, 248 aa, Rosa hybrid cultivar
MAYENKPNTVLDADAQRRLGRGKIEIKRIENTTNRQVTFCKRRNGLLKKAYELSVLCDAEVALIVFSNRGRLYEYSNNSVRETIERYKKACADSSNNGSVSEATTQYYQQEAAKLRAQITTLQNSNRGYMAEGLSNMSIKELKGVETKLEKAISRIRSKKNELLFAEIEYMQKRELDLHNNNQLLRAKIADNERHQQSINAIAGGHGSYEIMQPTQPFHEARNYFQVNALEPNIHQYSRHDQISLQLV

SEQ ID NO: 10875 - protein, 93 aa, Fragaria x ananassa
WESHIWDNGKQVYLGGFDTAHSAARAYDRAAIKFRGTEADINFSVGDYDEDIKQMSNYTKEEFVQILRRQSTGFARGSSKYRGVTLHKCGHWE

SEQ ID NO: 10876 - protein, 229 aa, Bacillus amyloliquefaciens
MSSLFQTYGRWDIDIKKAKGTYVEDQNGKTYLDFIQGIAVSNLGHCHEAVTEAVKKQLDSVWHVSNLFQNSLQEQAAQKLAAHSAGDLVFFCNSGAEANEGAIKLARKATGKTKIITFLQSFHGRTYAGMAATGQDKIKTGFGPMLGGFHYLPYNDPSAFKALGEEGDIAAVMLETVQGEGGVNPASAEFLSAVQSFCKEKQALLIIDEIQTGIGRTGTRFAYQHFGLS

SEQ ID NO: 10877 - protein, 701 aa, Oenococcus oeni MCW
MMVSDGPSGLRKQADASNALGLNKSVVAVNFPSSSLTAASFDRALLQELGRNLGQAAKAERVRILLGPGINLKRSPLAGRNFEYFSEDPYLTGELASSYVQGVQESGVGVSLKRFAANNREDQRFTASSNIDQRSLHELYLSAFEKAVKMARPATIMCSYNAINGTLNSQNQRLLTQILREEWGFKGLVMSDWGAVSDHVAALKAGLDLEMPGKGNESTSEIIEAVNKGQLDEKVLERAASRVIQMVEKWQPENKTVISYDLEKQHRFARQLVGESIVLLKNEQQLLPLKSNQSLAVIGQLAEKPRYQGSGSAHVNAFNTTTPLKVVQDILPKTAYQAGYQIDSDQIDQQAEQAAVDLAKQADQVVVFSGFPSSYESEGFDKKTISLPDNQNHLIERLAAVNKKIIVVLENGSALEMPWVGQVEAIVETYLAGEAVGEATWDILFGRVNPSGKLAESFPIKLADNPTYLTFNADRKNENYHEGLFVGYRYYDKKKQEVLFPFGHGLSYTTFEYRKLELLKSDHEVTVSFEIKNTGSVAGKETAQIYLSNQTSEIEKPLKELKGFAKVSLNPGQTKQVEIVLDKRSFSWYNPETDKWQVDNGSYQIQLAASSRDIRLTKNLLIDWSENKVQALSPDSYLSDILKEQAFKAPLKESGLDKLLEQLAGDENNQAILTNMPLRALMMMGVSNHQIQQFIKLANQS

SEQ ID NO: 10878 - protein, 139 aa, Glycine max
MATAATISATPLAPLPSSRHAFASPKMLRSLPFLRRRLPSLAAAAVKQDAAVWNAAPVASIGAASADGSLFHLRVDLSDAADLASSFTAPGQYLLVRVPGEDDLKPAFMAIASPPGGGAFEFLVKAVPGATAEKLCGLR

SEQ ID NO: 10879 - protein, 256 aa, Triticum aestivum
MGFLEDFQASVETLPAMLHKNYSLMRELDKSLQGVQLENEQRCQQEIEDIKHGLESGSITTYEPAKLKFSDEAIEEQKHCVRIADEKVALATQTYDLVDAHIQQLDQYMRKLEELRLEKEAAAAAAAAAADTAVAATSAAPAGAGSLRSAAADPAPKTGRAGERSRGGRKKAKVPMEMPTEMPMEQPAIDLELPVDPNEPTYCFCNQVSYGEMVACDNPDCKIEWFHFGCVGLKEQPRGKWYCLSCSAFQKKRKGR

SEQ ID NO: 10880 - protein, 751 aa, Geobacillus stearothermophilus
MENQNRQNAAQCPFHGSVTNQSSNRTTNKDWWPNQLNLSILHQHDRKTNPHDEEFNYAEEFQKLDYWALKEDLRKLMTESQDWWPADYGHYGPLFIRMAWHSAGTYRTGDGRGGASTGTQRFAPLNSWPNNANLDKARRLLWPIKKKYGNKISWADLFILAGNVAIESMGGKTIGFGGGRVDVWHPEEDVYWGSEKEWLASERYSGDRELENPLAAVQMGLTYVNPEGPDGKPDPKAAARDIRETFRRMGMNDEETVALIAGGHTFGKAHGAGPATHVGPEPEAAPIEAQGLGWISSYGKGKGSDTITSGIEGAWTPTPTQWDTSYFDMLFGYDWWLTKSPAGAWQWMAVDPDEKDLAPDAEDPSKKVPTMMMTTDLALRFDPEYEKIARRFHQNPEEFAEAFARAWFKLTHRDMGPKTRYLGPEVPKEDFIWQDPIPEVDYELTEAEIEEIKAKILNSGLTVSELVKTAWASASTFRNSDKRGGANGARIRLAPQKDWEVNEPERLAKVLSVYEDIQRELPKKVSIADLIVLGGSAAVEKAARDAGFDVKVPFFPGRGDATQEQTDVESFAVLEPFADGFRNYQKQEYSVPPEELLVDKAQLLGLTAPEMTVLVGGLRVLGANYRDLPHGVFTDRIGVLTNDFFVNLLDMNYEWVPTDSGIYEIRDRKTGEVRWTATRVDLIFGSNSILRSYAEFYAQDDNQEKFVRDFINAWVKVMNADRFDLVKKARESVTALQYVRSHRSNGGRGLQ

SEQ ID NO: 10881 - protein, 347 aa, Halobacterium sp. NRC-1
MRAAVYQGPGEIAVEEVPKPDIESPEDAVIRVTHTAVCGSDLWFYRGDSDREAGSRVGHEPMGIVEEVGDDVTSVAPGDRVIAPFAISCGECEFCRQGLYTSCVEDESWGSEANGGGQGEYVKCPFADGTLVRVPDRYADDEDVLESLLPLTDVMGTGHHAAVSAGVGEGDTAVVVGDGAVGLCGVLAAQRLGAERIIAMGHHEDRLELAAEFGATDTISARGDDAIERARDLTHGGANHVMECVGAASAMDSAIAIARPGGTVGYVGVPYGVEDGGLDVFTMFSDNITIRGGVAPVRAYAEELMADVLQGTLDPSPIFTKTVDLDGVPEGYAAMDDREAIKVLVKA

SEQ ID NO: 10882 - protein, 327 aa, Glycine max
MGGWAIAVHGGAGVDPNLPPERQEQAKQLLTRVLNLGISALRSDASALDVVELVVRELETDPLFNSGRGAALTEKGTAELEASIMDGYKRRCGAVSGVTTVKNPISLARLVMEKSPHSYLAFNGAEDFARQQGVEIVENEYFITPENVGMLKLAKEANTILFDYRVPLQNGYDNCGVEVENPLQMNGLPISVYAPETVGCVVVDSEGRCAAATSTGGLMNKKCGRIGDSPLIGAGTYACKVCGVSCTGEGEAIIRGTLAREVAAVMEYKGLGLEEAVEYVMEHRLDGGKAGLIAVSSSGEVAYGFNSNAMFRACATQDGFMEVGIWE

SEQ ID NO: 10883 - protein, 432 aa, Shewanella oneidensis MR-1
MFDSYSGYRLFTRLAVFLLLCLLIGLLVGNPLWILIIGLLGLVIWHYRQLARLNFWLWRDRKLTPPQGSGSWEGVFNGIYRLQGKNRRRVGQLAALLGRFRQGAEALPDAAVVLDSEHNILWCNKLAQLMLGFVWPQDNGQRIDNLIRHPDFSAYIKAGKYKEPLELTSPVSERRLLEIRIMAYGDRQLLLIARDITRIRQLEGMRKEFVANVSHELKTPLTVLQGYLEMMQSMAEPDSMNAKPLALMQQQTQRMQSMVEQLLVLSRIEDAADIDLENTVNMSQLMDVLKEEAKALAKDKYELSFHCEPGLDSHGNELQLRSACSNLISNAIRYTEPGGKISVQWRSVATGGLFSVADTGEGIAPQHISRLTERFYRVDSARSRQTGGSGLGLAIVKHALSHHHSELNISSELGKGSTFSFVIPQHLIERKK

SEQ ID NO: 10884 - protein, 329 aa, Synechocystis sp. PCC 6803
MTPKLIIHGGASSLDDKGGLATVRQSLHQIVAAVYETLTAGGSAMDAVVQGCELLENEPRFNAGTGSVLQSDGQVRMSASLMDGDRQNFSGVINVSRIKNPIQMAQFLQGQTDRILSDYGAADLAREMQLPIYDPATDFRIQEWMEERGEDVRKKMARLIADPTVGIEARKGTIGVVALDANGKIAAGTSTGGKGLERIGRVSDSAMPAGNYATRFAGVSCTGVGEDIINECLAAKVVIRVKDGQNLAQAMAKSITEALENNTDLGAIALDHQGHIAWGKTCPVLLAAYHTGTAIGDTLELTDGDHYGNASILKLQKTVKKIQTKTRGK

SEQ ID NO: 10885 - protein, 3475 aa, Nodularia spumigena
MAQNIDNKKLIAATLSKMEAMQARITELETRQSAPIAVIGMGCRFPGGISSPEIYWNYCQAGGDAIVEVPANRWDISKYYAPEPTPGKMNSRYGGFLQEDITEFDARFFSISAREATSMDPQQRLLLEVTWEALENANIPPTNLAGDRVGVFVGITSVDHAMTVYKSNYEQIDSFFGTGNSLSAAAGRLSYFLNLRGPAMSIDAACASSLVAIHQAIRSLRNHECELALVAGVNLILNPAITINLSQSGMMSPDGRCKTFDAAANGYVRGEGCGVLVLQRLSAAQKKGDRILAVLRGSAVNHNGAAAGLTVPSGPAQQDLLRQALTDARVSPQQVGYIEAHGTGTSLGDPIEMNAIAAVYGKRSQPLYVGSVKTNIGHLEAAAGIAGMIKTILSLQHGEIPPHLHFQKPNPLINWQGYPIKIPSQIIPWSNHGEIRIAGVSSFGFSGTNAHVIVEQAPAAKTTEIKLQRPSHLLTISAHNETALKELAQRFHTRLESDPEIGDICHSAAIGRSPLPERLAIVADTLPELQQKLSAFANEKTIDHLTFSQRFSGEKQPKIAFLFTGQGACYAGMGEQLYQTQPTFRKYIDQCADILANHLEYSLQNILFGNQTDLLNQTAYAQPAIFALEYSLTMLWKSWGIEPNLLIGHSVGEYVAACVAGVFSLEAGLQLVVKRGQLMQTAPTGKMAVVFADQATVLSLLENYTDTVSIAAINHPQQIVISGESHSIDQIIANCKTQNIPVQFLSLSGAYHSPLMEAILDEFETAAQSIDYDEPKTLLLSGIDGQPLETAPNASYWRKQCRQTVQFLQSIITALNKGYNLFLEIGYRPILAEQGRRYHDEAIWLSSLNRGLDSWQTMLATLAQLYIHGVSFNAEKFNQDYGYRNVQLPTYPFQRKRFQFQPPSQINEEHIEREQTKMTVAKVSHTQKHQQEIGKQLKSILAVLLKEDENEIRDDETLLNLGADSIILTDFTRKIEEKFSVKVRIDQLFTDLQRIVDIANYLSNYIAQEALETSEPISVGNIILSQNSELNNYLWVISQLQPIVVAYILKALGALGQSLNQAETWTTENLLQTLPIAPKYYLLITRYLKTLEQAGIIQNQGNVWTVKNLPTPFSLPETIENLQTHCPAAKPELEMLQRCGENLAEVIKGNIDPLELIFPAGSLIHAESIYGNSPVSRLMNQRVAQEINRILENFSSGDRPYQIIEVGGGTGATSEAILNNLNLTNVTYSFTELSPVLLNKARQKFQHRDHLNFHQLNIEKSPISQGIPAHSYHIVVAANVLHSTRNITETLNHIRELLLPGGFLVLLETVENNSWLDLTFGLTPGWWRFQDKELRLDTPLLSGETWCSVLKRCGFTTTDIFSQQNNVSIYNGQELIIASAPAESAIVSQPKTVAVSIPTSGKEALMMAQLQSLKDLKDIHEKTIIKQLEILQSASVAPSPTSEVLIRQTEPAPPQKATIEIAPLPQKIKTDSPKKPSSPSLNPLALKLAENKSLTEKQQAFISNLQIIYNQKTAKSKAYSQNSRKTMVDVKPTIDFRMALKEFQYPIVSESAQGAYFRDIDGNDYIDLAMGFGVNFFGHSPDFVIAAVQQQMQHGIGLGMQSNIAAETAALVSEITGVERVAFSNTGTEAIMAAVRIARSRTKRLKIVLFSGSYHGTFDGILARVGEEPGTAQPLSLGTPSGMVEDVIVLTYGAEESLEIIAAQADNLAAVLVEPVQSRKPDLQPQEFLQKLRKLTHEKEIALIFDEIITGFRMALGGAQEWFDVEADIVVYGKAIGGGLPISMICGKADFLDTIDGGFWSYGDNSHPHTELTGYGGTFCRHPLALAACRAVLLHLRAQGGTLQKRVNQLTNRLATEVNEFFQETGIPIRIVNFGSLFRFEPFGAYSLFLQPIELPLFYYLLNLKGIYTWEKRVCFLSTDHTNQDIDKVVIAVKEAIRELRQAGFFENAKPPQAKKREESDRSDDEDGRSSINQRFPTSEAQRQLWLLAELDTTASASYNVTTSLELRGNIEILYLQQAINEVVNRHEALRTQILEQGELQEVFNTVKIDLPLINLIDAENPEAAALTLRTQLSQKPFDLGSAPLFAAVLMRLAPEHYLLSLKTHHIVADGWSLGLILNEIGKLYSAKIGVSTDNLAPPMQFRQYLALRQQEAQSSQMQEHRDFWLKTYEGEIPVFELPTDFPRPAVKTYTGGRESKIIAPQLWRNLQTVGRQNQATLFMTMFAAYTAFLRRISGDDDLVIGIPISGRQFEGSEGLVGFCSQFLPVRIQTNITASFVDHLRHTKETLIAAFKHQSHALEELLAALQLQRDFSRSPLISVSFNMDPSLTLPEFEGLEVLLPPEPIGYTPFDLGFNFIEINDALIIYCNYNTELFKPETIKQFLESFEFLMEGVINNGNRLLSQLPLLTQSQEAKLLAELQGQTIDFPQTATIIDDFIAKVNSTPNAPALIVGDNTLSYGELNQKVNQLTNYLHQKYQLSSGKAIALIIGRNQNLIIAILATFKTGATYVPIDPEYPQSRIDFILKDSGCDVCLTESNFVSQLPQDIEAICLDKIDHTLAKFDTSEPHIKRDSSQIAYILYTSGSTGTPKGVMGCHISILNVIRSLRLTFDLDQHPDWHYIFTAPITHDPSLRNIFLPLTIGAALYMYEVKHIGHLVSFLQENQINALHTTPSIYREILAVLDTGETIPSLKYISAGGEKLDRETAIALRKRFPADIVSNVYGSTETCVGVAQYRIDENLNTDVPLGEVFHNNRLFVLDEFNNTVPLHVVGEICVEGVALASGYHNLPQITAEKFQPSFMTEGKTIFRTGDLGKQIAPGVIEFLGRKDNQVKVNGYRIDPGEIEYQLSRHSQIERAIVLPTNVDNQTQLSAYCKTESDIEISEIREFLSNFLPVYMIPTFFIFLKQFPLTRHGKIDLRSLAEFKGIGNLTQLAYTAPRNNLESKLVHIWEKILTKQPIGIFDNFFEIGGHSLLLSRVVTHVHKELNVLVKLAEFFKVPTIAGLAALVSKTQYDYQEPIPAITQQTSYPMSHGQRRLWALEFLDRNHTAYGMPSAYLFKGNLNIAAFENAFQHLLQRHEILRTTFTLIDNEPRQVVHESMNFQVKQIDLTEDEEQAEIIAEAIHNNAKNTFNLETGSLLKVNLLKVTQQSYIVLFNMHHIISDGWSAGVLIKDFLVLYHAYGQQNLELPPPLRIHYKDYSSWQEKRLNTSELQAQRDYWLNKLTPAPTRLNLPLDYARPGVQSFQGSAVIWQPDPELIKGFRVLLQNQESSLFMGLLTLVKSFLFCYTEQNEITVGSPIAGRNHPDLEEQIGFYVNMLVLRDQIAVDDSFATLLAKVKTTTLEAYDNQEYPFDKLVSDLNFPRDPSRNPLFDTAIVLQNNQNVELLLDGITVHPLDQEIVSAKFDLEFTFVEESQLYLKLIYNTDIFVHERISLMLKLLEGLLEEIVKLPEIPFLKLSFNTENSDEGDSKLFATNFNF

SEQ ID NO: 10886 - protein, 532 aa, Schizosaccharomyces pombe
MQTPSSASAESEKDSGNTYVGPWLLGRTLGQGNLAKVKLGKHFQTNEKVALKMVYNDELEDKDTWKRLQREVTILRQLHHPNIITLYQVFRVPKYTVLALEYMDTDLHSMVVKHNRLDECTTRKIFRQIVHAIDYCHLHRVAHRDLKLENILLNKDLVVKLTDFGLSNFMLDGSFLSTSCGTPHYAAPEVIQGRYYDGCDVDVWGCGILLYLMLVGEFPFEDVTISNVLSRVCKGIYTIPSFVSSSASDLIRQMLMVLPTSRIKVAEIMQHPWFIADLPTHSRLPSRTSSFSSKHRSVTFSPPDLAILFDPSITSPSSSVGQIPQPTDHSALSPSKPMSISGTESPNPDPASLCYSSYEDLYSATSWHSDMAESSGFLDPTDIPPIPSNVETLRSSLPQRHASFMNKVYNHPLSRPPAPNRLRSLRWHYGIQTAKNPIEVLRKLCEALLELGARFRPCDEESFLKENKYKVFSCITCHNSPVYLVIELFSIGPSASVIDIRFSSSDDSIKYTSSYSPMPFLEVVKQLILKIA

SEQ ID NO: 10887 - protein, 361 aa, Shigella flexneri
MKIPVTGGAGFIGSAVVRHIINNTQDSVVNVDKLTYAGNLESLADVSDSERYAFEHADICDAVAMSRIFRTAPARRVMHLAAESHVDRSITGPAAFIETNIVGTYVLLEAARNYWSALNDEKKKSFRFHHISTDEVYGDLPHPDEANNNETLPLFTETTTKRQNSPYSASKASNDHLVRAWKRTYGLPTIVTNCSNNYGPYHFPEKLIPLVILNALEGKALPIYGKGDQIRDWLYVEDHARALYTVVTEGKAGETYNIGGHNEKKNIDVVLTICDLLDEIVPKEKSYREQITYVADRPGHDRRYAIDADKISRELGWKPQETFESGIRKTVEWYLANTNWVENVKSGTYQSWIEQNYEGRQ

SEQ ID NO: 10888 - protein, 205 aa, Thermobifida fusca
MGDCARAWTVSVIFAVRTCLWVGGDAMSGSGERPHIGSAEFGEPTIHPDAWIAPGAVVVGRVRIGAHSSVWYGSVLRADTEDIIVGERCNIQDLCCLHADPGEPAILGNGVSLGHKAMVHGAVVEDGALIGINAVVLGGATVEAGALVAAGALVPPGRRVPAGTLWAGVPGKVIRELTDAERENLVGTAERYVGYAAQHRGVTWR

SEQ ID NO: 10889 - protein, 379 aa, Arabis blepharophylla
MSTTGQIIRCKAAVAWEAGKPLVMEEVEVAPPQKHEVRIKILFTSLCHTDVYFWEAKGQTPLFPRIFGHEAGGIVESVGEGVTDLAPGDHVLPIFTGECGDCPHCHSVESNMCDLLRINTERGGMIHDGESRFSIDGKPIYHFVGTSTFSEYTVIHSGQVAKINPDAPLDKVCIVSCGLSTGLGATLNVAKPKKGQSVAIFGLGAVGLAAAEGARIAGASRIIGVDLSSKRFDEAKKFGVTEFVNPKDHDKPVQEVIAEMTDGGVDRSVECTGSVQAMIQAFECVHDGWGVAVLVGVPSKDDAFKTHPMNFLNERTLKGTFFGNYKPKTDIPGVVEMYMNKELEIEKFITHTVPFSEINKAFDYMLKGEGIRCIITMGA

SEQ ID NO: 10890 - protein, 374 aa, Pterocelastrus tricuspidatus
ALSIAGAVQSQKLAVRAISQLQSLPGGDIKLLCDTVVESVRDLTGYDRVMVYKFHEDEHGEVMAESRRPDLEPYIGLHYPASDIPQASRFLFKQNRVRMIVDCHASPVLVIQDDGLMQPLCLVGSTLRAPHGCHAQYMENMSSIASLAMAVIINGSDEEGVGGRNPTRLWGLVVCHHTSARCIPFPLRYACEFLMQAFGLQLNMELQLAAQLLEKHVLKTQTLLCDMLLRDSPTGIVTQSPSIMDLVKCDGAALYYQGNYYPLGVTPTEAQIKDIVEWLLAFHGDSTGLSTDSLADAGYPGAALLGDAVCGMSVAYITNRDFLFWFRSHTAKEIKWGGAKHHPEDKDDGQRMHPRSSFKAFLEVVKSRSLPWEN

SEQ ID NO: 10891 - protein, 262 aa, Ralstonia solanacearum
MDLHLQNKLALVTGSTKGIGHAIAVALAAEGARVILNGRTDASVAEAVSRLLAEVPGAHAEAFAGDLSDPAQARALAARFPRVDILVNNLGIFDPKPFEDIDDAEWLRFFSVNVMSGVRLSRAYLPGMKAQNWGRIVFISSESGVQIPAEMVHYGVTKTALLGLSRGLAELCAGTAVTVNAVLPGPTRSEGVEAFTRKLSGGQGFEAFEKAFFETARPTSLIKRFATPQEVASLVAYVASPLSSATTGAALRVDGGVVKSAF

SEQ ID NO: 10892 - protein, 155 aa, Zea mays
FWFVGEREKMAASDVEYRCFVGGLAWATDDHSLNNAFSTYGEVLESKIILDRETQRSRGFGFVTFSTEDAMRSAIEGMNGKELDGRNITVNEAQSRGGRGGGGGGYGGGRRDGGGYGGGGGGYGGGRGGYGGGGGGYGGGNRGGGYGNNDGNWRN

SEQ ID NO: 10893 - protein, 190 aa, Escherichia coli CFT073
MCHWFTLIQECTMNGGPMKRFSLAILALVVATGAQAASEKVEMNLVTSQGVGQSIGSVTITETDKGLEFSPDLKALPPGEHGFHIHAKGSCQPATKDGKASAAESAGGHLDPQNTGKHEGPEGAGHLGDLPALVVNNDGKATDAVIAPRLKSLDEVKDKALMVHVGGDNMSDQPKPLGGGGERYACGVIK

SEQ ID NO: 10894 - protein, 585 aa, Triticum aestivum
MAEAGDPTLEQGLLADPEESNQLTYTGDGSVDFSGNPVVKEKTGRWKACPFILGNECCERLAYYGISTNLVTYLTKKLHDGNSSAARNVTTWQGTCYLTPLIGAILADAYWGRYWTIATFSTIYFIGMSVLTLSASVPMLMPPSCEGVICPEASPLQYTVFFLGLYLIALGTGGIKPCVSSFGADQFDDTDPAERIQKGSFFNWFYFSINIGALISSSFLVWVQDNLGWGLGFGIPTVFMGLAIISFFAGTSLYRFQKPGGSPITRVCQVVAATLRKWNAHVPEDSSLLYELPDGVSAIEGSRQLEHTDELRCLDRAATITDLDVKEDSFNNPWRVCTVTQVEELKILVRMFPVWATTIVFSAVYAQMSTMFVEQGMVLDPTIGSFKIPPASLSTFDVVSVIIWVPIYDSILVPIARRFTGKERGFSELQRMGIGLVISILAMSAAAVLEIKRLAIAREAHLVDQNVPVPLSILWQIPQYFLVGASEVFTFIGAPEFFYDQSPDAMRSLCSALQLITTALGNYLSAFILTMVAYFTTRGGRPGWIPDNLNEGRLDYFFWLLAGLSFLNFLVYVLCANRFKSKKAA

SEQ ID NO: 10895 - protein, 250 aa, Sulfolobus tokodaii
MGIELNGKIAIVTGASSGIGRAIAFKLASRGANLILGDVKIDELRKVAEEIAKETKVKVIPLYVNVGDFNSTKEFYNKGISELGVDYVDILVNNAGINRDALFVKMTYEQWDEVIKVDLYSMFNMTKQVVDGMVKRNYGRIINISSLSWLGNIGQANYSAAKAGVIGFTKTLARELGKYNITVNAICPGFIDTPMTRAVPEKIRQRIIERIPMGRIGQPEDVANLVAFLASDEASYITGEVIGVTGGLVL

SEQ ID NO: 10896 - protein, 38 aa, Zea mays
DWSTVSEAMEDVTALFYDEVRNEIYTGNSHGLVHVWSN

SEQ ID NO: 10897 - protein, 261 aa, Streptomyces aureofaciens
MSDQGKRVAVVTGATSGIGLAVARLLAVQGHRVFIGARSAENVAETVKELQGEGLEVDGAVVDVRSTDGVRAWIQAAVDRFGSVDVVVNNAGRSGGGVTADIAEELWHDVIDTNLNSVFRVTREALTTGGLRAKDRGRIINIASTAGKQGVVLGAPYSASKHGVVGFTKALGNELAPTGITVNAVCPGYVETPMAQRVRQGYAAAYDATEEAILEKFQAKIPLGRYSTPEEVAGLVGYLASDAAASITSQALNVCGGLGNF

SEQ ID NO: 10898 - protein, 308 aa, Hordeum vulgare subsp. spontaneum
MATAGKVIKCKAAVAWEAGKPLSMEEEEVEVAPPQAMEVRDKILYTALCHTDVYFWEANGQTPVFPRILGHEAGGIVESVGEGVTELVPGDHVLPVFTGECKECAHCMSEESNLCDLLRINVDRGVMIDDGQSRFTIDGKPIFHFLGTSTFSEYTVIHVGCVAKIDPEAPLDKVCLLSCSISTGLGATLNVTKPKKGMTVAIFGLGAVGLAAMEGARMSGASRIIGVDLNPAKHEQAKKFGCTDFVNPKDHTKPVQEVIVEMTDGGVNRAVECTGNADAMISAFECVHDGWGVAHKEAVFKTHPMNFL

SEQ ID NO: 10899 - protein, 431 aa, Brassica rapa
DNSYTLSFLLVFFVLILFHPAFSIYTNTLSSTESLTISSNRTLVSPGNVFELGFFKTTLSSRWYLGIWYKKISQRTYVWVANRDSPLFNAVGTLKISGNNLVILGDSNNSVWSTNHTRGNERSPVVAALLANGNFVIRYSNNNDAKGFLWQSFDFPTDTLLPEMKLGYDLKKGLNRFLTSWRNSDDPSCGDYSYQLDTQRGMPEFYLLINGSRYHRSGPWNGVQYSSIPEDQKSSYMVYNFTENSEEVAYTFRMTNNSIYSRLKISSEGFLERLTWTPNSIAWNLFWSSPVDLKCDVYKTCGPYAYCDLNTSPLCNCIQGFKRSNEQQWDLRDPSSGCIRRTRLSCNGDGFTRMKNIKLPDTTTAIVDRSIGLKECENRCLSDCNCTAFANADIRNRGTGCVIWTGELEDIRTYFADGQDLYVRLAAADVV

SEQ ID NO: 10900 - protein, 365 aa, Zea mays
MSVAKEAGPSSRAVLVTGGAGYIGSHAVLQLLTAGFRVVVVDSLANSSELVIRRLRSLAVEHAKNLAFHKVDIRDKDGLEKVFASTRFDAVIHFAGLKAVGESVQKPLLYYDHNVVGTINLLEVMAAHGCKKLVFSSSAAVYGSPKNSPCTEDFPLTPHNPYGRTKLMAEEICRDIYHSDPEWNIILLRYFNPVGAHPSGYLGEDPCGTPNNLMPFVQQIAVGRRPSLTIFGNNYATKDGTGVRDYIHVVDLAEGHLFALKKLFESSSNIGCEAYNLGTGKGTSVLEIVNAFEKASGKKIPLIMGQRRPGDAEILFSSPAKAERELHWKAKYGITEMCGDLWNWASKSPYGYAASESPKLNGSSR

SEQ ID NO: 10901 - protein, 206 aa, Triticum aestivum
MVSLKLQKRLASSVLKCGKGKVWLDPNEVNEISMANSRQNIRKLVKDGFIIRKPQKIHSRSRARRAHEAKQKGRHSGYGKRRGTREARLPTKILWMRRMRVLRRLLRKYREAKKIDKHMYHDMYLKVKGNMFKNKRVLMESIHKSKAEKAREKTLSDQFEAKRAKSKASRERKIARREERLAQGPRDHAPAPAAAAPAAAPKKAKK

SEQ ID NO: 10902 - protein, 278 aa, Rhizobium sp. NGR234
MERFEGKVAVVTGAGAGIGKACALAIAREGGRVVVADLDGSAAIACTAQIAAEAGNALAMAMDIADAQAVAALFETAERHFGGVDLLVNNASAMHLTPRDRAILDLDLAVWDQTMATNLRGTLLCCRQAIPRMIARGGGAIVNMSSCQGLSGDTAQTSYAVSKAAMNMLSASLATQYGHAQIRCNAVAPGLIMTERLLAKLDKCMQRHLSRHQLLPRVGHPEDVAALVAFLLSDDASFITGQVVCIDGGMLAHMPTYADGGNSCAGRTAGDTAETARC

SEQ ID NO: 10903 - protein, 150 aa, Zea mays
  unsure (1)..(150): unsure at all Xaa locations
MATACHLAAPLGLAPLPRGCASAGVVAVVRRARPPGSKIPRGVAVRATSGGEGATEEAPDMVKAAQXAWDKVEDRYAVPPIGVAAIVALWTVVGAIKAIDKLPLLPGVLEIVGIGYTGWFTYRNLVFQPDREALIGKIKSTYKEITGSSN

SEQ ID NO: 10904 - protein, 392 aa, Thryallis longifolia
DLEPVNPADVPVTAAGALKSYKLAAKAISRLQSLPSGNISLLCDVIVKEVRDLTGYDRVMVYKFHEDEHGEVVSECRRSDLESYLGLHYPATDIPQASRFLFMKNKVRMICDCLAPPVKVIQDERLPQPLSLCGSTLRSPHGCHAQYMANMGTIASLVMSVTINEDDDMMDGDQQQMARKLWGLVVCHHTSPRFVPFPLRYACEFLIQVFGVQINKEVEFAAQVSEKHILRIQTMLCDMLLRDAPVAIITQSPSVMDLVKCDGAALYYKNRFWLLGVTPTEAQIRDIAEWLLEYHSGNTGLSTDSLLEAGYPGASVLGDAVCGMAAVSITSRDFLFWFRSHTAKEIKWGGAKHDPDDKDDGRKMHPRSSFKAFLEVVKWRSLPWEDVEMDAI

SEQ ID NO: 10905 - protein, 447 aa, Triticum aestivum
MSTRSRSVQGSVGGGGSTAGGSAVPLAVLLRREVVSERTAAERPELQHGLFSQAKKGEDFVFLKPDCERLPGFPSSSFSAFGLFDGHNGNGAAIYTKENLLNNILGAVPADLNREDWLAALPRAMVAAFVKTDKDFQTVARSSGTTVTFVIIDGLVVTVASVGDSRCVLEAEGSIYQLSSDHRFDASKVEVDRVTEAGGDVGRLNVVGGAEIGPLRCWPGGLCLSRTIGDQDVGEFIVPVPLVKQVKLSTAGGRLIISSDGVWDALTAEQALNCSRGLPPEAAAEQIVKDAVHSKGLRDDTTCIVVDLVPEKGNPAMSAPKKQPGMGVFKNMFRKKTSSDSSSHADREYMDPDVVEEIFEDECALLSRRLDSEYPVRNMFKLFICAICQVELKPNQGISVHEDSSQPGNLRRWDGPFLCQSCQEKKEAMEGKRRSRDSSSRNSGSSE

SEQ ID NO: 10906 - protein, 361 aa, Bacillus megaterium
MTIQWFPGHMAKARRQVTEKLKLIDIVYELVDARIPQSSRNPMIDEIIVNKPRIVLLNKVDKADPRVTQQWLDYYKEQGIYALAIDAQAGKGMKQIVSSSKELLQEKFDRMRAKGVKKPRAIRAMIVGIPNVGKSTLINRLASKKIAKTGDRPGVTQAQQWIKVGNELELLDTPGILWPKFEDETVGYKLATTGAIKDTILNMQDVAVYALRFLTSHYPEQLKQRYNLNEIPEDIVELFDAIGSRRGCLMGGGMVDYDKTAELVLREIRTDKIGTFTFDDQLFRFIYELANRENMYIEPSAAAGLQGPLHLMETGSSYIQAQALENDMSKATHLVWSTGGSMVPAEVMNSYYKQGKNLMNG

SEQ ID NO: 10907 - protein, 365 aa, Buchnera aphidicola (Macrosiphoniella ludovicianae)
  unsure (1)..(365): unsure at all Xaa locations
MKKQYRIAVLPGDGIGPEVMKEAYKILKILQNYFSLHIEIKEFNIGGIALDKEGVALPKDTLLGCENSDAILFGSVGGKKWNNLPIEKRPERASLLPLRKHFNLFYNLRPAKLYSELRFLSPLRSKTXIKNGFDILCIRELTGGIYFGEPRGRLKKNNIEYAFDTEVYYDYEINRIAHVAFQLARTRKNKVCSIDKANVLNSSLLWREIVTKVSKNYPDVHLSHLYIDNATMQIIQNPNQFDILLCSNLFGDILSDECAIITGSIGMLPSASLNEKNFGLYEPAGGSAPDIAGKNIANPIAQILSLSMLVRYGMNLKKIANKIDQSVISVLKKGYRTFDISDDNNXFLKTNEMGDVIADALINGE

SEQ ID NO: 10908 - protein, 86 aa, Oryza sativa
MYWAKKILEWTSGPEEALSTAIYLNDKGWKERPVFGKIRYMNYAGCKRKFDVDAYISYVKRLAGQSKKRNAEESPNPVVKLSKSQH

SEQ ID NO: 10909 - protein, 363 aa, Pichia jadinii
MPEKTIVVLPGDHVGTEITAEAIKVLKAIEEVKPEIKFNFQHHLIGGAAIDATGVPLPDDALEASKKADAVLLGAVGGPKWGTGAVRPEQGLLKIRKELNLYANLRPCNFASESLLDLSPIKAEVVKGTDFVVVRELVGGIYFGERKEDDGSGVASDTETYSVPEVQRITRMAAFMALQHNPPLPIWSLDKANVLASSRLWRKVVTETIEKEFPQLTVQHQLIDSAAMILIKYPTQLNGIVITSNMFGDIISDEASVIPGSLGLLPSASLASLPDSNKAFGLYEPCHGSAPDLPANKVNPIATILSAAMMLKLSLDLYEEGVAVETAVKQVLDAGIRTGDLKGTNSTTEVGDAVAEAVKKILA

SEQ ID NO: 10910 - protein, 472 aa, Hordeum vulgare subsp. vulgare
MTYGGERRGSNPTTVIHKTFLPLPLFRVLETTSSSCSSPSFPRPYFSPPVHSAAGEDFRRRAREAIGIDPWMDAAQWHQGLGLVKPMEEMIMAGNPNPNPNGNPSPQPAPPSGAEAQRAPLPGPPAAGAGAAAGTGSTERKAARPQKEKAINCPRCNSTNTKFCYYNNYSLQQPRYFCKTCRRYWTEGGSLRNVPVGGGSRKNKRSSSSVVSSAAGAVSTSGAASGTVPVGGMPAKNPKLMHEGAHDLNLAFPHHHGRVLHPSEFAAFPSLESSSVCNPGGAMAANGVGGGRGMGTFSAMELLRSTGCYVPLPQVQLGMPPEYAAAGFALGEFRMPLQHQQQHHQQQQQQQQQHHQHQHQHQQHQQQQQQQQVQNMLGFSLDTGGGGDGGGYGGGLQGAQESATGRMLFPFEDLKPGANAAGGGGASGGDQFEHSKEQGGGGGHETLGFWNNSMIGNGSSNDAGGGGGGGSW

SEQ ID NO: 10911 - protein, 339 aa, Zea mays
  unsure (1)..(339): unsure at all Xaa locations
MATISSTLLLNSSRSALPLRFPKFSGFSSSSPFPRSYRFGRRNLEPLSNGMLSSGSRADGATAAAASMEGVMTEAMKLIQSASPTWKSAVANNLLIFVLGSPLLVTGLSASGIAAAFLLGTLTWRAYGSAGFLLVAAYFVIMIYNIXGTAATKVKMTQKEAQGVAEKRKGRRGPRSVIGSSAAGCVCAFLSIYQVGGAAFSQLFRLGFVSSFCTKVSDTVSSEIGKAYGKTTYLATTFKIVPRGTEGAMSLEGTLAGLLASFFLASVGCFLGQITPPEAAVCVLASQIANLGESIIGASFQDKEGFKWLNNDVVNVINISLGSIVAILMQQFILQNWVK

SEQ ID NO: 10912 - protein, 352 aa, Lagenaria leucantha
MVPPYALDSLYCSEDHWENDDEEEERGFHEQPYSNLTTESSSPILAVAEQDLFWENDELISLFSREKPNELFKTIQIDPSLAAARRSAVGWMLKVNAHYSFSALTAVLAVDYLDRFLSCFHFQRDKPWMSQLAAVACISLAAKVEETQVPLLLDLQVEDSRYLFEAKTIKKMELLVLSTLQWRMNPVTPFSFVDYISRRLGFKEHICWEILWQCERTILSVILESDFMSFLPSVMATATMLHVFKAMEEPTLSVEYDSQLLNILGIDKGNVEECCKLISNASRRNGNQFKKRKIGSIPGSPNGVMDVSFSSDSSNDSWSVASSVSSSPEPLTKKNRANGSMSGDCETFRTLS

SEQ ID NO: 10913 - protein, 324 aa, Agrobacterium tumefaciens str. C58 (Cereon)
MGGDMLPSVLKDNLRLPVIASPLFIISHPQLTLAQCKAGVIGAFPALNARPESQLDEWLAMITEELAAYNRANPERPAAPFAVNQIVHMSNRRLEHDLGLCVKYKVPVVISSLGAVPEVNAAVHSYGGIVLHDVINDRHARSAIRKGADGLIAVAAGAGGHAGTLSPFALIQEIREWFDGPLLLAGAIANGGSILAAQAMGADMAYIGSPFIATEEARASDGYKQALVDAQAKDIVYSNYFTGVHGNYLKSSIVASGMDPDNLPEADPSKMDFETATGGAKAWKDIWGAGQGIGAIKAVEPVAALVDRLAAEYEAAKGRICAKA

SEQ ID NO: 10914 - protein, 250 aa, Suaeda maritima subsp. salsa
MGKSYPTVSEENQKSIEKAKKKLRGLISEKHCAPIMLRLAWHSAGTFDVQSKTPGPFGTMRHQAELAHGANNGLDIALRLLEPIKEQFPEISFADFYQLAGVVAVEVTGGPEIPFHPGREDKPEPPQEGRLPDATKGCDHLRDVFIKQMGLTDQDIVALSGGHTLGRCHKDRSGFEGPWTPNPLVFDNSLLKELLSGEKDGLLQLPSDKALLADPVFRPLVEKYAADEDAFFADYSDAHLKLSELGFADA

SEQ ID NO: 10915 - protein, 375 aa, Mycobacterium tuberculosis H37Rv
MRTRVAELLGAEFPICAFSHCRDVVAAVSNAGGFGILGAVAHSPKRLESELTWIEEHTGGKPYGVDVLLPPKYIGAEQGGIDAQQARELIPEGHRTFVDDLLVRYGIPAVTDRQRSSSAGGLHISPKGYQPLLDVAFAHDIRLIASALGPPPPDLVERAHNHDVLVAALAGTAQHARRHAAAGVDLIVAQGTEAGGHTGEVATMVLVPEVVDAVSPTPVLAAGGIARGRQIAAALALGAEGVWCGSVWLTTEEAETPPVVKDKFLAATSSDTVRSRSLTGKPARMLRTAWTDEWDRPDSPDPLGMPLQSALVSDPQLRINQAAGQPGAKARELATYFVGQVVGSLDRVRSARSVVLDMVEEFIDTVGQLQGLVQR

SEQ ID NO: 10916 - protein, 392 aa, Pterandra arborea
DLEPVNPADVPVTAAGALKSYKLAARAISRLQSLPSGDISLLCDVLVKEVRDLTGYDRVMVYKFHEDEHGEVVSECRRPDLEAYFGLHYPATDIPQASRFLFMKNKVRMICDCLAPPVQVIQDKRLAQPLSLCGSTLRSPHGCHAQYMANMGAIASLVISVTINEGDDMMDGDQQQMARKLWGLVVCHHTSPRFVPFPLRYACEFLIQVFGVQITKEVELAAQVREKHILRTQTLLCDMLLRDAPVAIITQSPNVMDLVKCDGAALYYRKKFWLLGVTPTEAQIKEIAEWLLEYHSGNMGLSTDSLMEAGYPGASVLGNAVCGMAAVKITSRDLLFWFRSHTAKEIKWGGAKHDPDDKDDGRKMHPRSSFKAFLEVVKWRSLPWEDVEMDAI

SEQ ID NO: 10917 - protein, 180 aa, Zea mays
  unsure (1)..(180): unsure at all Xaa locations
MVMQLLMRLGKIPPETPQLEGLHTDAAYDIRKCPPSIGVQXTYDPTRSKGYPDGRVTGLANYIXRPRKAAETPMPHKIGSTGTVITTARTSSCDGYNIAMTCPVITTGGGEPXPIAMTAPVITDDQQTPGKVTMQLLLCAKYTTVEEAPRTTDXRVVIREVPDRKFGVARFSGVATDRTV

SEQ ID NO: 10918 - protein, 363 aa, Buchnera aphidicola
MKKNYRIAVLSGDGIGPEVMQEACKILNVLKKYFFLSLEIQKFNIGGIAIEREGVALPKTTLLGCENSDSILLGSVGGKKWDNLPVEQRPERAALLPLRKYFNLFSNLRPAKLYPELKCLSPLRSDIVKNGFDILCVRELTGGIYFGEPKGFVNKNNTKYAFDTEIYHEYEIIRIAHLAFKLARSKKKKVCSIDKSNVLRSSILWGKVVESVSKKYPDVHLSHLYIDNAAMQIIKDPNQFDVLLCSNLFGDIISDECATITGSIGMLPSASFNEKNFGLYEPAGGSAPDIEGKNIANPIAQILSLSMLVRYGMNLNQIADKIDKAVNNVLKKGYRTSDISHDNNFLKTDEMGDLIVDSLINGK

SEQ ID NO: 10919 - protein, 166 aa, Sinapis alba
MASPDVEYRCFVGGLAWATDDRALETAFSQYGEVLDSKIINDRETGRSRGFGFVTFKDEKSMKDAIEGMNGQDLDGRSITVNEAQSRGSGGGGGGRGGGGGYRSGGGGGYGGGGGGYGGGGREGGYSGGGGGYSSRGGGGGGYGGGGRRDGGEGGGYGGSGGGGGW

SEQ ID NO: 10920 - protein, 552 aa, Oryza sativa
MNRNKSVAIYLQKEKKAAEEESHSPRPIYIGIVVHRRARDVLPAGGRGHPLTHAVTPAALMPRCRSTSPRPNDRDPTAQDALASVPPTWYISTAIDRLVRVTVTPDHLATIIIPSLLLFDFGYGCSRGYGDMSDDGRKRKMICVSSWLPDPACLPKVSPMPSNIQTKAIANLKNALVKRRDAYLGLINHKVLSLCVAATMEVTAEFGGAYYGGAAGREKKALQQGCGDHFAVDDLLVLPYGEEDETTREGEATGGKEEAAGLADSSTITALDSCSNSFGLADGDFPGELCEPYDQLAELEWLSNYIDDAFATEDLQKLQLISGIPSGGFSTASVPSAQAQAASAAASMAVQPGGFLPEAPVPAKARSKRSRSAPVNWSSRLLVLPPPPASPPSPASMAISPAESGPSKPAKKKDAPAPPAQAQLSSVPVPSGGSAPAAAAGEGRRCLHCETDKTPQWRTGPMGPKTLCNACGVRYKSGRLVPEYRPAASPTFMVSKHSNSHRKVLELRRQKEMHQQTPHHHQPQVAAAGGVGSLGDDFLIHHHLRTDFRPPI

SEQ ID NO: 10921 - protein, 1536 aa, Neurospora crassa
METGMDHTQDTTPTAEGHGQLGNSYQTPDQLAANNIKVQDYIDNTALATDLHANDASNSSATADGGSSAITSPTNLSSWSASSDRQLGHGSVQDPEDRVFPIRSVISVDLAATPPVNDDIRARRRISLSEGYATSAGAGNTATPTRPHASTVPTAKSGAIDVESRPTVSQSQSSVSQPDGSSVFSSSSAGTMRHKRRMNAMTGSLSSVQADADRYGKGRPIELVLGDSSEEESDGGADGSGDGGDLGTIGASSSSGRESLDALPETHFAPRFKHIVTNEGHAVITGRDGQLQRCEDEPIHTPGAVQGFGLMVVIQEERDGRFIVRFVSENSKRIIGYTPQELFRMNNFLDIFTDEQSENLLDHIDFIRDEDSDPAINGPEVFSLSIRLPKAKTSVRLWCAIHVHPSRPELTICEFELDDDHDYPLRPPEEDLPDIPEDTLQSNPTTEELTESTAISSKPLRVLRSARRRRGEAGAMQVFDIMSQVQEQLANAPNLEKFLKILVGIVKELTGFHRVMIYQFDSSFNGKVVTELVDPMQTRDLYKGLHFPATDIPSQARELYKLNKVRLLYDRDVESARIVCRTPEDLETPLDMTHSYLRAMSPIHLKYLANMAVRSSMSISINAFGDLWGLVSCHSYGPKGMRVSFPIRKMCRLIGDTASRNIERLSYASRLQARKLINTVPTDKNPSGYIIASSDDLLKLFNADFGMLSIREETKILGKIEQSQEALAMLEYLRLRKFSSVVTSQDIKIDFPDLRYPPGFQVIAGLLYVPLSVGGNDFIVLFRKGQVREVKWAGNPHEKTIQAGSAAYLEPRKSFKVWYETVIGKSREWSEEEVETAAVLCLVYGKFIEVWRQKEAALRSSRLTRLLLANSAHEVRTPLNAIINYLEIALEGSLDQETRDNLARSHSASKSLIYVINDLLDLTKTEEGKDLVKDEVFDLLACIREATEPFRHDAKRKGITYEVIEHPGLPRFVHGDQRRVRQAVANVTANAVKHTSEGSVRVELYVAEVQDNRARIDIVVQDSGQGMSNAQLDALFRELEQVDTDIGSESSDDDNSQSGKALGLGLAVVARILRNMDGQLRLKSEVGKGSRFVIQLPFDLPEEETSRDTVGASSGNTAQLSLGSGTASASAASVTQMQDGEVMLVDRNNGSSWSVNNATGSLASKKSYDDNLSITSKGSGRSALSDADRLIDAIQNPLTLGEPEPESVARQRRNSRGPYYNPSSSLLGSSKGRSVSPGSRKRPDVPTRSVSSPNTKKDLPFEKPTTEVAPGPSEPAPAAQGVQYVTDSRVPIKPVKLPDEMFDKPVVPPQSTSKVLFEIKDAVADKAKAASSAVKEQQSVSSQQPAPPPAPAKEASTTNNKLQVLVAEDDPINVKVLRKRLEKAGYKVTHALNGEDCAAVYEDKPVVFDVVLMDMQMPIVDGLTSTKMIRAFEKTNRDGSGQQLSDIASDHGRVPIFAVSASLVEQEKDTYVDAGFDGWILKPIDFKRLETLLQGITDDKARNDALYVQGQWERGGWFEKKGVGNMGQEQEENHEQ

SEQ ID NO: 10922 - protein, 453 aa, Campylobacter jejuni subsp. jejuni NCTC 11168
MSECPFFPKPYKNKASTLLTFLLKRRSWLDGLYERSYKMQTGYVKMPNFDLYVINDTKEVKRMMVDEVREFPKSAFLHELLSPLLGESIFTTNGEVWKKQRELLRPSFEMTRINKVFNLMSEAVADMMDRFSKYPNHAVIEVDEAMTFITADVIFRTIMSSKLDEEKGKKILNAFVTFQEQSVHTAMRRMFRFPKWLSYVLGDCKRAKAGDVIRQVLSDIIKPRYDMADNAEFEDILGSLLLVVDADTNKRFSFEEILDQVAMLFLAGHETTASSLTWTLYLLSLYPKEQEKAYEEITQVLQGGVIEISHLRQFKYLTNIFKESLRLYPPVGFFAREAKKDTQVRDKLIKKGSGVVIAPWLIHRHEEFWTNPHGFNPSRFEGEYKKDAYLPFGVGERICIGQGFAMQEAILILANILKTYKLELEEGFVPDVVGRLTVRSANGMRIKFSKRKL

SEQ ID NO: 10923 - protein, 108 aa, Triticum aestivum
ICTRLPVGQQKFAAVIDLRGWGYANCDIRGYVAALDIMQSYYPERLGRVFLIHVPYMFMAAWKMVYPFIDDKTKKKFVFVADKDLDATLRDAIDESQLPEAYGGKLKL

SEQ ID NO: 10924 - protein, 399 aa, Lactobacillus sakei
MNEYQVGQDFKKVQLTAKEKSELFAEGIITVILLLLLNLSIMVLLQQAIVNNPQLRGGVWMIKNAIAIGPNGWHIWSWQNWFVISMGIADVLLVYWRLIRRYHQMQMWHVIGELHYIADGHLEHRINLRVNRDLQRVIDSVNTLVDSTVRSMEEERKIEKSKDELITNVSHDLRTPLTSIIGYLGLIEDNQYQTKDELTKYTHTAYVKAQQMKVLVEDLFEYTKVRQTSTPIAKTTFDMEQMLEQLAASFELEAQKKNMQITVECQPTPLMMEADTEKLGRVFNNLIANALKYGKGGKQIILSAEKVGQEAIIKVSNDGQQIPSDSLNQLFDRFYRVEASRSQETGGTGLGLAITQSIVALHGGYIYADSTPQLTSFVIHLPLKLGRQIEPQNGAAKNS

SEQ ID NO: 10925 - protein, 118 aa, Salvia columbariae
DLKPENVLVREEGHIMLSDFDLSLRCSVSPTLVKSSSTHDASTADAAANGSILNDENAVRGCAQPSSFFPRLLPKKNRKSKSDFGLGNNMNGLPELMAEPTNVRSMSFVGTHEYLAPE

SEQ ID NO: 10926 - protein, 221 aa, Zea mays
  unsure (1)..(221): unsure at all Xaa locations
MAGTVTVPGSSTPSTPLLKDELDIVIPTIRNLDFLEMWRPFFQPYHLXFKDSACRCFGYMVSKKKYIYTIDDDCFVAKDPSGKDIDALEQHIKNLLSPSTPFFFNTLYDPYREGADFVRGYPFSLREGAHTAVSHGLWLNIPDXDAPTQLVKPKERNERYVDAVMTIPKGTLFPMCGMNLAFDRDLIGPAMYFGLMGDGQPIGRYDDMWAGWCVKVICDHL

SEQ ID NO: 10927 - protein, 121 aa, Glycine max
  unsure (1)..(121): unsure at all Xaa locations
XXXXARXXXXFWYVVAGYLXTXLTNISWVCWIFSKSVTAQHIFLGMRGLGVGALTFDLSVFALFLFNLLILPFFAIANFFCGYAFIFYLVISFIIIFFLIDKYFHIVLFFLFIIFYLLISI

SEQ ID NO: 10928 - protein, 336 aa, Zea mays
  unsure (1)..(336): unsure at all Xaa locations
MAGQEVANKRVVLKRYVTGFPGADDMEVVTGTARVAVPPGSTAMVLKNLYVSCDPYMRGRMTKHERPSYVPDFVVGEVLENFGVCKVIASGHQDFKVGDLVWGMTGWEEYTLIHNPESFFKINHSESSLSYYTXWAGFFDVGKPKKGDNVFVSAASGAVGQLVGQFAKLTGCYVVGSAGSDEKVNLLKTKFGFDEAFNYKKEQDLDAALRRYFPEGIDIYFENVGGSTLEAVLPNMRIHGRIPTCGMISQYNLEEPEGVHNLFEIIAKRLRMEGFMVFDYYGQYHKFEQEMAGYLKAGKIAYVEDIAEGLEKAPEALIGLFTGRNVGKQLVAIARE

SEQ ID NO: 10929 - protein, 499 aa, Oryza sativa
MDAAAATAVNGVLEVEERKAQKSYWEEHSKDLTVEAMMLDSRAADLDKEERPEILSLLPPYEGKSVLELGAGIGRFTGELVKTAGHVLAMDFIESVIKKNESINGHHKNASFMCADVTCPDLMIEDNSIDLIFSNWLLMYLSDEEVEKLVKRMVRWLKVGGYIFFRESCFHQSGDSKRKVNPTHYREPRFYTKVFKECQALDQDGNSFELSVLTCKCVGAYVKSKKNQNQICWLWQKVDSTEDRGFQRFLDNVQYKASGILRYERIFGEGFVSTGGIETTKEFVDRLDLKPGQNVLDVGCGIGGGDFYMADKYDVHVVGIDLSINMVSFALERAIGRKCSVEFEVADCTKKTYPDNTFDVIYSRDTILHIQDKPSLFKSFFKWLKPGGKVLISDYCKCPGKPSEEFAAYIKQRGYDLHHVRAYGQMLENAGFHDVIAEDRTDQFLDVLERELAKVEKNKNEFVSDFSQEDYDAIVNGWKAKLQRSSAGEHRWGLFIATK

SEQ ID NO: 10930 - protein, 443 aa, Glycine max
  unsure (1)..(443): unsure at all Xaa locations
MASQMAILFRTRTLLSSKPTTTLIKTITTFPFLSQEPQLVDPTPPPSSSSTPLPPNPASGSPLYHENWRSPIPPPPSSAGTSHALSPVGFYNRATSDTYDPRALLDLFGDWMASQQWHDVKFLFESWVRSLDKTGKPNKPDVNLFNHYLRANLMLGASAAELLDLVAQMAEFDNVAPNTASFNLVLKAMCQAKETLAADKLLQRARAXMLQSGNDALPDDESYDLVIGMLFSMGQIDTAFKYIDLILKSGNVLSMKVFMNCVGSCVNKGRLDTLVTIIERCRASDQNKALCPNWDLCNFIVEIATREDNSKLSFYGLEFMAKWIVKGERQRPPIYLSVDEGLVLSALLTAGRTYNSDLLVASWAVLDRSLRKKKVPNPESYLGKIYALASLGNLQKAFGTLNEYEAAYGDSGQEAEDLFCPFTSLHPLVVACSKKGFETLDNV

SEQ ID NO: 10931 - protein, 455 aa, Bacillus anthracis str. A2012
EDLEKLNVSDNGIKNVPELFKMQKLKTLDLSNNKLDNAALDGIHQLENLDALLVNNNEINNLDEISKVSKLNKLEMMSNKVRDISPLASLKNLQWLNLSDNKIQDISTLSSMLDLLSLKLAGNEIRDVRPVIQLAQWITVDIKNQKIVLEDGQMNQEIQIPIYDLEGEIFEDIELKSTDGIVTDRGTVVWKTPGAKIYSFSLNGNYHGLSLLFSGTVTQNIVAKEEPKEPVEEVEGSKEEPIKEAEGSKEEPKEPAKEVEGSKEEPKEPAKEVEGSKEEVKEPAKEVEGPKEEVKEPTKEVEGPKEEVKEPTKEVEGPKEEVKEPMKEVEGSKEEVKGPTKEAEGSKEEVKEPTTEVEGSKEVKEPGKEVEGSKDAINQSAVAQETNVNNQVGKEKVVENQNMKENKPAVTKQEESKKSLGATGGQENTSTLLSGLALVLSALSMFVFRKRLFKK

SEQ ID NO: 10932 - protein, 142 aa, Zea mays; identical to SEQ ID NO: 7510

SEQ ID NO: 10933 - protein, 95 aa, Fagopyrum tataricum subsp. potanini
GRLYEYANHSVKATIDRYKKACSDSAGVTSVAEANAQYYQQEAAKLRNQIRTLQNNSRNLSRHMMGEGLSSLSMKDLKNLETRLEKGISGIRAKK

SEQ ID NO: 10934 - protein, 374 aa, Loeseneriella africana
ALSIAGAVQSQKLAVRAISQLQSLPGGDIKLLCDTAVENVRNLTGYDRVMVYKFHEDEHGEVVAESRRPDLEPYIGLHYPATDIPQASRFLFKQNRVRIIVDCHASPVSVIQDDGLMQPLCLVGSTLRAPHGCHAQYMENMGSIASLAMAVIINGNDEDGMGGRNPTRLWGLVVCHHTSARCIPFPLRYACEFLMQAFGLQLNMELQLAAQLLDKHVLKTQTLLCDMLLRESPTGIVTQSPSIMDLVKCDGAALYYQANYYPLGVTPTEAQIKDIVEWLLAFHGDSTGLSTDSLADAGYPGATSLGDAVCGMAVAYITNKDFLFWFRSHTAKEIKWGGAKHHPEDKDDGQRMHPRSSFKAFLEVVKSRSLPWEN

SEQ ID NO: 10935 - protein, 173 aa, Helicobacter pylori
MNLDQLEVSHDADSLCVVIEISKHSNIKYELDKESGALMVDRVLYGAQNYPANYGFVPNTLGSDGDPVDALVLSDVAFQAGSVVKARLVGVLNMEDESGMDEKLLALPIDKIDPTHSYVKDIDDLSKHTLDKIKHFFETYKDLEPNKWVKVKGFENKESAIKVLEKAIKAYQD

SEQ ID NO: 10936 - protein, 654 aa, Raphanus sativus
MLARVYRSGSSSSPAVSAARLFCTRSIRHALAKKSRDGESGFGGESLKLRSGFHEIKGLEDAIDLFGDMVRSRPLPSVIDFCKLMGVVVRMGRLDVVISLHRKMEMRRVPCNAYSFTILMKCFCSCSKLPFALSTFGKITKLGFHPTVVTFSTLLHGLCVEDRISEALDLFHQMCKPNVVTFTTLMNGLCREGRVVEAVALLDRMLEDGLQPNQITYGTIVDGMCKMGDTVSALNLLRKMEEVSHIKPNVVIWPLERRTCMINGFCSSGRWSEAQQLLQEMLERKKISPDVVTYNALINAFVKEGKFFEAEELYDEMLPRGIIPSTITYSSMIDGFCKQNRLDAAEHMFYLMATKGCSPDIITFNTLIAGYCRAKRVDDGIKLLHEMTEAGLVANTITYTTLIHGFCQVGDLNAAQDLLQEMVSSGVCPNVVTCNTLLDGLCDNGKLKDALEMFKAMQKSKMDIDASHPFNGVEPDVQTYNILISGLINEGKFLEAEELYEEMPHRGIVPDTITYNSVIHGLCKQSRLDEATQMFDSMGSKSFSPNVVTFTTLINGYCKAGRVDDGLELFCEMGRRGIVANAITYITLIHGFRKVGNINGALDIFQEMMASGVYPDTITIRNMLTGLWSKEELKRAVAMLEDLQMSVGYQLEDE

SEQ ID NO: 10937 - protein, 349 aa, Zea mays
  unsure (1)..(349): unsure at all Xaa locations
MGERGAEEDGSGGSSLSLMCLEDGADLDAGGSAESADDGEPAVVAHSDAGEDQEEEYMDYLVSKESSFCCSPSSSPVSSDAGAETRPSSTASSSDEWFRCARHATVAWVLETRAYFGFSHRAAYLAVSYMDRFCLRRCMDVSVMPWAAXLLAVACLSLAAKMEEYRAPALSEFRAHDDYDFSSVCIRRVELLVLSTLGWRMGGVTPLDYLPCLSFRLRRGGGGGLIAAKAAALIFSAAEAASVLDYRPSTVAVAAVLAAAHGAMTKEALECNMSSLTPSCLLDKDDVHACYSTMLSESSSPTPSKLADKRPPPSSSGSTMYESVDAASSFAATAGRSKRARLEMPAIGP

SEQ ID NO: 10938 - protein, 263 aa, Zea mays
MAATSLARLSRRTTISATAAAPSLRRLLSVTSTASVAATAPPPPPPSAAGAAAVGADRVRWDYRGQRKLVPLGQWMPKVAVDAYVAPEAVLAGQVTVHDGASVWSGAVLRGDLNKITLGFCANVQERCVLHAAWTAPTGLPAETLVDRYVTVGAYCLLRSCTIEPECIIGQHSVLMEGSLVETNSILEAGSVLPPGRRIPTGELWAGSPARFVRKLTNEEIMEIPKLATAINDLMQSHFSEFLPYSNAYLEVEKLKKSFSIPL

SEQ ID NO: 10939 - protein, 427 aa, Coxiella burnetii
MTELTGVSIVTYQHIKVPSQGEKITVNKAVLEVPDRPIIPFIEGDGIGIDIAPVMKNVVDAAVEKSYAGKRKIEWMEIYAGEKATKVYGKDNWLPDETLGAIKEYQVAIKGPLTTPVGGGIRSLNVALRQQLDLYVCLRPVRYFTGVPSPVKTPEKVNMVIFRENSEDIYAGIEWPAGSPEAVKLINFLQNEMGVKKIRFPETAGIGIKPVSKEGTSRLVRRAIQYAIDNDRDSVTLVHKGNIMKFTEGAFKDWGYEVAVKEFGAKPLDGGPWHVFENPKTGQKITIKDVIADAFLQQILLRPAEYSVIATLNLNGDYISDALAAEVGGIGIAPGANLSDTVGLFEATHGTAPKYAGQDKVNPGSLILSAEMMLRYLGWKEAADLVVQGIEGAIESKTVTYDFARLMTGAKEVSTSQFGKAIIKHIL

SEQ ID NO: 10940 - protein, 172 aa, Zea mays
MRDRIRRQRIPRFRRQGVHPIRDDPQATAMAMAYKMATEGMDVKEECQRWFMEMKWKKVHRFVVYRIDERSRAVLVDRVGGPGEGYEELVAALPGDDCRYAVFDFDFVSVDNCQKSKIFFIAWSPAASRIRAKILYATSKQGLRRLLDGVHYEVQATDPSEMGFDVIRGRAQ

SEQ ID NO: 10941 - protein, 126 aa, Glycine max
MESRTNADSFWTWNANNDNNQKQFSVTKFLGNNKPPKPQTSVLGPGFGAGIGCGAGIGLGLVGGFGYGGWPFNHMHLVFGLGMGCGVGVGFGFGQGIGYDFNFRTRKSRKSKKNFSDPQNTIVIQI

SEQ ID NO: 10942 - protein, 288 aa, Hordeum vulgare
EEGSTGTASLAGVPVDAAECKILVAHIHSHGHGNWRALPKQAGLLRCGKSCRLRWINYLRPDIKRGNFSDEEEQSIIQLHQLLGNRWSAIAARLPGRTDNEIKNVWHTHLKKRLDPSAQEQQEEAGAAKKRKKPAAAAAAPRKRDGKVKMRNLNALTARAAAAAPVSSPERSVSSTVTESTSTASAAAEQHGNSGSSSASASASVKEECFTSSEESEEFQIDESFWSETLSMPLDDLNDVCMEPHDAFGKPDGDMDYWLRLFMEGGGGSGSGSDDNNNHDGALDLPQI

SEQ ID NO: 10943 - protein, 131 aa, Triticum aestivum
MAGASSWSSSCSCTSSLGSLDDDDVFCVVKPGSPGAAAEGSVKFLCSYGGMILPRHPDGALRYVGGNNRVLSVDRSLQFHELQRKLTDMCGWEALSLRCQLPTEDLDALVSVTTNDDLGHLLEEYDAASRR

SEQ ID NO: 10944 - protein, 95 aa, Oxalis tuberosa
LYAGINISGTNGEVMPGQWEYQVGPSVGIEAGDHIWASRYILERITEQAGVVLTLDPKPTDGDWNGAGCHTNYSTKSMRDEGGFEVIKKAIFNLS

SEQ ID NO: 10945 - protein, 355 aa, Neurospora crassa
MASSQYAKELEVAQLAVQRAARLTKRVFHEKAKGTVSKDDKSPVTIGDFGAQALIISALKANFPSDEIVAEEEAAQLREDTPLRDQIWELVKSTKLDDEAAEQLLGGAIKDADAMLEIIDQGNSKGGAKGRIWTIDPIDGTKGFLRGGQYAVCLGLMVDGDVKVGVLGCPNLPVDDAAPLAADIGTNATDEGRGVIFSAVQGQGATSRPLGTAGLAEGKSIAMKPITEMSNASFCESVEAGHSDQGVAGQIAQKLGITKPSVRMDSQAKYGSIARGAGDIYLRLPTSKSYQEKIWDHAAGDLIVREAGGQVTDVSGNRLDFSVGRTLAENKGVIAAPAAVHDQVIKVVQEVLGQQ

SEQ ID NO: 10946 - protein, 160 aa, Caulobacter crescentus CB15
MAMSIYDYSAKTLDGQDVSLADYRGQVLLIVNTASKCGFTPQYEGLEALYKAHKDRGFTVLAFPCNQFGAQEPGNAEEIANFCSLTYDVSFPVMSKIDVNGADAHPLYKFLKKEQKGVLGTEAIKWNFTKFLIGKDGQVVDRFAPTVKPEDLKVAVEALL

SEQ ID NO: 10947 - protein, 398 aa, Oceanobacillus iheyensis HTE831
MTITSTNIIEETNYYGAHNYHPLPIVVSEANGVWVKDPEGNSYMDMLSAYSAVNQGHRHPKIIEALKNQADKVTLTSRAFHNELLGPWTKRMAKLTKKDKVLPMNTGVEAVETAIKAARRWAYQVKGVTENQAEIIAADGNFHGRTLNAISLSNDPDATKNYGPFVPGINKVSYGDINAIEKAITENTAAIILEPIQGEAGIIIPPEGYLKKVRELCSEKNILFIADEVQTGFARTGKMFACEWENVEPDIYVMGKALGGGVFPVSAIAANNEIMDVFTPGSHGSTFGGNPLACAVSMAAIDVIEEENLVNKSLESGKYFADKLRAVNFEGIKEVRARGLFIGMEFHQPVREICEKLKDKGILCKETHVNTIRFAPPLVITKDEMDWAIQRIEEVLTN

SEQ ID NO: 10948 - protein, 351 aa, Rhodobacter sphaeroides
MAEVKRIIGWFGEKRGVSFDVSEDLVGGAAYDAHGTPLADETMARAQEVDAVLLGAVGGPKYDVLDFSVKPERGLLRLRKEMDLYANLRPAQCFDALADFSSLKRDIVAGLDIMIVRELTSGVYFGEPRGIFPDNEGGRFGVNTQRYTTEEIRRVARSAFELARRRNNRVCSMEKANVMESGILWREEVQWVHDNEYPDVELSHMYADNGAMQLVRWPRQFDVIVTDNLFGDILSDCAAMLTGSLGMLPSASLGAPMANGRPKALYEPVHGSAPDIAGQGKANPIACILSFAMALRYSFDMGEEATRLEKAVETVLADGVRTADLMGPEGGTPVSTSGMGDAVLAALDASL

SEQ ID NO: 10949 - protein, 104 aa, Olea europaea
PGLHGFHVHALGDTTNGCMSTGPHFNPVGKEHGAPGDENRHASDLGNITVGEDGTAAINIVDKQIPLTGPHSIIGRAVVVHSDPDDLGRGGHELSKRTGNAGGR

SEQ ID NO: 10950 - protein, 470 aa, Saccharomyces cerevisiae
MSKLVISTSIFQSQVADLLPCNNHQKSQLTYSLINAYDLLQHFDEVLTFPYARKDDLLEFHSKSYIDYLINGRFNKMMAQDVNNPMVESKWSELSELADNWNEKIDYNPSQDLQRFTTRENLYNYYLNHSQALENNMDCINNSEVPTNDKPTDTYILNSETKQYNLEGDCPIFSYLPMYCQVITGATLNLLDHLSPTERLIGINWDGGRHHAFKQRASGFCYINDVVLLIQRLRKAKLNKITYVDFDLHHGDGVEKAFQYSKQIQTISVHLYEPGFFPGTGSLSDSRKDKNVVNIPLKHGCDDNYLELIASKIVNPLIERHEPEALIIECGGDGLLGDRFNEWQLTIRGLSRIIINIMKSYPRAHIFLLGGGGYNDLLMSRFYTYLTWCVTKQFSNLRCGDNNSFQIDPFDVCDGDDSEQFIREHDLVEMYNEENYQYWIYEMEGSSRMKMLRNDNKDRDMVELMKFYEL

SEQ ID NO: 10951 - protein, 174 aa, Pseudomonas aeruginosa PAO1
MKYRLGDARVETHPDSWIAPSAAVIGKVRLDAGASVWFGAVLRGDNELIHIGEHSNVQDGSVMHTDMGYPLTLGKGVTVGHNAMLHGCSVGDYSLVGINAVILNGAKIGKYCIIGANALIPEGKEIPDGSLVMGSPGKVVRELSEPQKKMLEASAAHYVHNARRYARDLVEDPA

SEQ ID NO: 10952 - protein, 186 aa, Thermoplasma acidophilum
MVRVLILTGDAGESLEVMYPLQRMKEEGFEVDVAAPEKKKIQLVVHDFEEGFDTYTEKPGYKLQADLAFKDVDPSKYDALIIPGGRAPEYIRNDKDFIRIVKYFFEKHSPVAELCHAPLALAAAGVLKGRTTAAYPALAPDVAIAGGQFVDGAAVIDGNLVSARAWPDHPEWMRAFIKLLKEKVKK

SEQ ID NO: 10953 - protein, 403 aa, Archaeoglobus fulgidus DSM 4304
MHPALVLAAIALIAIKLDPRFVLGLLVLLTLIYGKKRGFSLKLRNVTEDESYFNAFLFSTILSALSCFSLPKDVVFASIFLISVHNYRKNALWNIAVYTTASLLYFLCYHAVNGVELRLAHTFFISLSGGLTAALVESVDTNADRRLTLLLAISSVFTIFKMYVPSASIYSLAFAFLLSFFVSLLALYAKVADESGLMSATIVGTTLILFADIRFFAVILLFYALGSAITKYKYSVKLERGIAEQAGGARGYANVFGNSLAPLFFAVQFGVSGDAIFAAAFVAAVAAALADTMASEIGKAEEKVYLITNFSRVEPGTSGGISVKGEFAALFGCIVTALLSLLLGIIGFDVLLPVTLSAFAGVHIDSLLGATLEKKGYLTNSAVNFLGTLSAGIICVLLLLPLL

SEQ ID NO: 10954 - protein, 338 aa, Leavenworthia uniflora
  unsure (1)..(338): unsure at all Xaa locations
TGQIIRSKAAVAWEAGKPLVMEEVEVAPPQKHEVRIKILFTSLSHTDVYFWEAKGQTPLFPRIFGHEAGGIVESVGEEVTDLQPGDHVLPIFTGECGDCPHCHSEESNMCDLLRINTERVGMIHDGESRFSINGKPIHHFLGTSTFSEYTVVHSGQVAKINPEAPLDKVXIVSCGLSTGLGATLNVAKPKKGQSVAVFGLGPVGLGAAEGARIAGASRIIGVDLNSNRFEQAKKFGVTEFVNPKEHDKPVQQVIAEMTNGGVDRSVECTGSVQAMIQAFECVHDGWGVAVLVGVPSKDDAFKTHPMNFLNERTLKGTFFGNYKPKTDIPGVVEKYMNK

SEQ ID NO: 10955 - protein, 95 aa, Oxalis peduncularis var. pilosa
  unsure (1)..(95): unsure at all Xaa locations
LYAGINISGTNGEVMPGQWEYQVGPSVGIEAGDHIWASRYILERITEQAGVVLTLDPKPIDGDWNGAGCHTNYSTKSMRDEGGFEVXTKAIFNLS

SEQ ID NO: 10956 - protein, 629 aa, Zea mays
  unsure (1)..(629): unsure at all Xaa locations
QRRRRRXGWGGGFRSLMRRKQVDSDRVRAEGQPQLAKELNVPELVAIGVGSTVGAGVYVLVGTVAREHAGPALTISFLIAGIAAALSAFCYAELASRCPSAGSAYHYSYICVGEGVAWLIGWALVLEYTIGGSAVARGISPNLALFFGGQDSVPWILARHQLPWFDIIVDPCAAALVFVVTVLLCVGIKESSFAQGVVTVLNACVMIFVIVAGSYIGFQIGWVGYKVSDGYFPHGVNGMLAGSATVFFAYIGFDTVASTAEEVKNPQRDLPLGIGVALAICCALYMAVSVVIVGLVPYFAMDPDTPISSAFARHGMQWAMYVVTSGAVLALCSTLMGSLLPQPRILMAMARDGLLPSFFSDVNKQTQVPVKSTIVTGICAAALAFAMDVSQLAGMVSVGTLLAFTIVAVSILILRYVPPYEVPLPPSMQESFRLNQECDEERDRGLLGVGNCNLSQTKDVIVAVESVKDPLIDKRLHKGKMDETKRRKIASLSIGSVCVGVLILASSASATWLPFLPICIGCTIGVVLLLAGLSLLSWIDQDAGRHSFGHSGGFTCPFVPVLPVLCILINTYLLINLSGDTWMRVGIWLLLGVLVYAFYGRTHSSLIDVVYVPAAQADEIYRSSSGYVS

SEQ ID NO: 10957 - protein, 581 aa, Zea mays subsp. mays
MKREYQDAGGSGGDMGSSKDKMMAAAAGAGEQEEEDVDELLAALGYKVRSSDMADVAQKLEQLEMAMGMGGVGGAGATADDGFVSHLATDTVHYNPSDLSSWVESMLSELNAPPAPLPPATPAPRLASTSSTVTSGAAAGAGYFDLPPAVDSSSSTYALKPIPSPVAAPSADPSTDSAREPKRMRTGGGSTSSSSSSSSSMDGGRTRSSVVEAAPPATQASAAANGPAVPVVVVDTQEAGIRLVHALLACAEAVQQENFSAAEALVKQIPMLASSQGGAMRKVAAYFGEALARRVYRFRPPPDSSLLDAAFADLLHAHFYESCPYLKFAHFTANQAILEAFAGCRRVHVVDFGIKQGMQWPALLQALALRPGGPPSFRLTGVGPPQPDETDALQQVGWKLAQFAHTIRVDFQYRGLVAATLADLEPFMLQPEGDDTDDEPEVIAVNSVFELHRLLAQPGALEKVLGTVRAVRPRIVTVVEQEANHNSGTFLDRFTESLHYYSTMSDSLEGAGAGSGQSTDASPAAAGGTDQVMSEVYLGRQICNVVACEGAERTERHETLGQWRSRLGGSGFAPVHLGSNA

SEQ ID NO: 10958 - protein, 279 aa, Synechocystis sp. PCC 6803
MALIQWYPGHIAKAERQLREQLNKVDVVLEVIDARIPLASQHPDVPLWVGEKPKLIILNRVDMITPELQEQWLTWFRQQNQTVYYANAKQGTGVKAISKAAQQAGKAVNERRQRRGMQPRPVRAVVMGFPNVGKSALINRLLGRKVVESARRAGVTRQLRWIRISDSLELLDSPGVIPLKLENQANALKLAICEDIGEAAYENQAVAIAMVDLLLDLSLGEALTQRYQVPPEAMNGDLYLIALADARHNGDRERAAVQLLNDFRKGLLGPLPLELPPEV

SEQ ID NO: 10959 - protein, 631 aa, Citrus sinensis
MPYARYLSTLLHKGPTATASQSYEFKRLGQSSSYSIYMLHPCFNLITRNQALSTKIFTTMAQPRKLFLALFAVVLVVTAVVTIIATRKNNSSNTNDEHIAAHAHAYAQPVIRSSCSATLYPELCFSALSAAPAAAVSKVNSPKDVIRLSLNLTITAVQHNYFAIKKLITTRKSTLTKREKTSLHDCLEMVDETLDELYKTEHELQGYPAAANNKSIAEQADELKILVSAAMTNQETCLDGFSHERADKKIREELMEGQMHVFHMCSNALAMIKNMTDGDIGKDIVDHYSKARRLDDETKWPEWLSAGDRRLLQATTVVPDVTVAADGSGNYLTVAAAVAAAPEGSSRRYIIRIKAGEYRENVEVPKKKINLMFIGDGRTTTIITGSRNVVDGSTTFNSATVAVVGDGFLARDITFQNTAGPSKHQAVALRVGSDLSAFYRCDMLAYQDTLYVHSLRQFYTSCIIAGTVDFIFGNAAAVFQNCDIHARRPNPNQRNMVTAQGRDDPNQNTGIVIQKCRIGATSDLLAVKGSFETYLGRPWKRYSRTVVMQSDISDVINPAGWYEWSGNFALDTLFYAEYQNTGAGADTSNRVKWSTFKVITSAAEAQTYTAANFIAGSTWLGSTGFPFSLGL

SEQ ID NO: 10960 - protein, 349 aa, Ralstonia solanacearum
MAYQINVLPSGRQFQAEDGETILAAALRQGIGLPYGCKNGACGSCKGHVREGSIVQGNHSPNALTAQEATEGRALFCCATPASDVTIEVREVHGAGDVPIKKIPCRVASLEKAAPDVTIVKLQLPATERMQFLAGQYVEFILRDGKRRSYSLANPPHADGPVELHIRHMPGGAFTDYVFGAKEGQPAMKERDILRFEGPLGSFFLREASDKPIILLASGTGFAPIKAIIEHAAFVGIQRPMTLYWGGRRPRDLYMHAMAEEWTRTLPGFRYVPVISDAQPEDGWTGRTGFVHQAVVADHPDLSGHEVYACGAPVMVNAARTDFAAQCRMHPDAFFADAFTSEADLHPAA

SEQ ID NO: 10961 - protein, 142 aa, Zea mays
  unsure (1)..(142): unsure at all Xaa locations
MAAADVEYRCFVGGLAWATSNESLENAFASYGEILDSKVITXRETGRSRGFGFVTFSSENSMLDAIENMNGKELDGRNITVNQAQSRGGGGGGGGGGYGGGRGGGGYGGGRRDGGYGGGGGYGGRREGGGGGYGGGGGGWRD

SEQ ID NO: 10962 - protein, 288 aa, SYNECHOCOCCUS SP. WH 8102
MSTPAIQWYPGHIAKAEQQLSRHLDKVDLVIEVRDARIPLATGHPHLDRWLKGKQHLLVINRRDMVTPAAREAWEAWFKGRGQRTVWCDAKAGTGVKQVQQAAIRAGDQLNERRRNRGMRPRPVRALTLGFPNVGKSALINRLVKQKVVASARRAGVTRTLRWVRLGQDLDLLDAPGVLPPRLDDQQAALHLALCDDIGQAAYDGELVAQAFLQLLIDLQQQQASGVAIPVLESRYGIPVQGETADPPYWLEAAAQRHTSGDTARMAQRLLDDFRKSALGSIALELPE

SEQ ID NO: 10963 - protein, 158 aa, Schizosaccharomyces pombe
MSHFYDLAPKDKDGNPFPFSNLKGKVVLVVNTASKCGFTPQYKGLEALYQKYKDRGFIILGFPCNQFGNQEPGSDEEIAQFCQKNYGVTFPVLAKINVNGDNVDPVYQFLKSQKKQLGLERIKWNFEKFLVNRQGQVIERYSSISKPEHLENDIESVL

SEQ ID NO: 10964 - protein, 180 aa, Rhizobium gallicum bv. gallicum
DFDAFPALEQLPLWGFDGSSTMQAEGRSSDCVLKPVAVYPDPARTNGALVMCEVMMPDGVTPHPSNSRATILDDEDAWFGFEQEYFFYENGRPLGFPEQGYPAPQGPYYTGVGYKNVGSVAREIVEEHLDLCLAAGINHEGINAEVAKGQWEFQIFGKGFKRAADQIWMARYLLLRLCEK

SEQ ID NO: 10965 - protein, 122 aa, Nicotiana plumbaginifolia
ITTKELGTVMRSLGQNPTEAELQDMINEVDADGNGTIDFPEFLNLMARKMKDTDSEEELKEAFRVFDKDQNGFISAAELRHVMTNLGEKLTDEEVDEMIREADVDGDGQINYEEFVKVMMAK

SEQ ID NO: 10966 - protein, 346 aa, Escherichia coli CFT073
MVWLANPERYGQMQYRYCGKSGLRLPALSLGLWHNFGHVNALESQRAILRKAFDLGITHFDLANNYGPPPGSAEENFGRLLREDFAAYRDELIISTKAGYDMWPGPYGSGGSRKYLLASLDQSLKRMGLEYVDIFYSHRVDENTPMEETASALAHAVQSGKALYVGISSYSPERTQKMVELLREWKIPLLIHQPSYNLLNRWVDKSGLLDTLQNNGVGCIAFTPLAQGLLTGKYLNGIPQDSRMHREGNKVRGLTPKMLTEANLNSLRLLHEMAQQRGQSMAQMALSWLLKDERVTSVLIGASRAEQLEENVQALNNLTFSTEELAQIDQHIADGELNLWQASSDK

SEQ ID NO: 10967 - protein, 422 aa, Sinorhizobium meliloti
MTSLTDRKNAAISRGVGMTTQVYADRAENAEIWDKEGNRYIDFAAGIAVVNTGHRHPKVIAAVKAQLDRFTHTCHQVVPYENYVHLAERLNAIVPGDFAKKTIFVTTGAEAVENAVKIARAATGRQAVVAFGGGFHGRTFMGMALTGKVVPYKVGFGAMPADVFHAPFPIELHGVTVEQSLSALKKLFAADVDPARVAAIIIEPVQGEGGFYPVPTAFMKALREVCDQHGILLIADEVQTGFARTGKLFAMEHHGVAPDLTTMAKSLAGGFPLAAVTGRAEIMDAPGPGGLGGTYGGNPLGIAAAHAVLDVIAEENLCERANQLGNRLKQRLAAIREKAPEIVDIRGPGFMNAVEFNDVRTNLPSAEFANKVRLLALEKGLILLTCGVHGNVIRFLAPITIQDEVFAEALDTIEASILEARG

SEQ ID NO: 10968 - protein, 73 aa, Oryza sativa
  unsure (1)..(73): unsure at all Xaa locations
VKMVTKMSEKVATGILSGVVKVTGYFTNSIANSKAGKKFFNLLPGEIVLASLDGFAKFCQXSEVAXEAYTLVX

SEQ ID NO: 10969 - protein, 362 aa, Streptomyces avermitilis MA-4680
MSLTIGIVGLPNVGKSTMFNALTKNDVLAANYPFATIEPNVGVVGVPDARLAKLAEIFGSQKILPATVDFVDIAGIVRGASEGEGLGNKFLANIRESDAICQVIRAFHDENVVHVDGKVSPKDDIETINTELILADLQTIEKVLPRLQRESRIKKDIGPKVAAVEAAQAILEKGETLFSAGIVQGSGNEELLHDLHLLTTKPFLYVFNVDEDELVDDDFKAEQRALVAPAEAIFLNAKLEADLAELDEEEAMELLESVGVEEPGMATLARVGFNTLGLQTYLTAGPKESRAWTIKKGATAPEAAGVIHTDFQKGFIKAEVISFEDLVETGSVAEARAKGKARMEGKDYVMQDGDVVEFRFNV

SEQ ID NO: 10970 - protein, 363 aa, Oryza sativa; identical to SEQ ID NO: 2538

SEQ ID NO: 10971 - protein, 515 aa, Burkholderia fungorum
MPVTITILAVKCGAEPSAGCSQYLGNIGHGKISGSAGPDHKSDRVIDIHTLGRNLNSAQQQDGLKRGLKNRHIQLIALGGAIGTGLFLGSASVLQAAGPSMILGYAIGGVIAFMIMRQLGEMVAQEPVAGSFSHFAYKYWGDFPGFLSGWNYWVLYVLVSMAELTAVGTYVHYWWPGVPTWVSALVCFAAINAINLANVKAYGETEFWFAIIKVAAVIGMIVFGGYLLISGHGGPQASISNLWAHGGFFPHGFHGLFMMLAVIMFSFGGLELIGITAAEADEPQKSIPKAVNQVIYRILIFYICSLTVLLSLYPWNEVAAGGSPFVMIFSQIGSTLTANVLNVVVLTAALSVYNSGVYANSRMLYGLAEQGNAPRALMKVDRRGVPYMAIGLSALATFTCVIVNYLIPAEALGLLMALVVAALVLNWALISITHLKSRKAMVAAGETLVFKSFWFPVSNWICLAFMALILVILAMTPGLSVSVWLVPAWLVVMWAGYVFKRRRAAVQGGARVVGR

SEQ ID NO: 10972 - protein, 482 aa, Staphylococcus aureus subsp. aureus MW2
MGSFFNKIARKEDPAIYQNKDGHLKRTLRVRDFLALGVGTIVSTSIFTLPGIVAAEHAGPAVALSFLLAAIVAGLVAFTYAEMAAAMPFAGSAYSWVNVLFGEFFGWVAGWALLAEYFIAVAFVASGFSANLRGLVKPIGIELPAALSNPFGTNGGFIDIIAAIVILLTALLLSRGMSEAARMENILVILKVLAIILFVIVGLTAINVSNYVPFIPEHKVTATGDFGGWQGIYAGVSMIFLAYIGFDSIAANSAEALDPQKTMPRGILGSLSVAIVLFIAVALVLVGMFHYSQYANNAEPVGWALRQSGHGVVAAIVQAISVIGMFTALIGMMLAGSRLLYSFGRDGLLPSWLSHLNDKHLPNRALVILTIIGVLIGSMFPFAFLAQLISAGTLVAFMFVSLAMYRLRKREGKDLPIPAFKLPLYPVLPAVTFVLVLLVFWGLGFEAKLYTLIWFIVGIILYLSYGLRHSKKNDVAEYHPPK

SEQ ID NO: 10973 - protein, 592 aa, Triticum aestivum
  unsure (1)..(592): unsure at all Xaa locations
AVSGRPRLGGGVAGAPCAAVLRPPARPPRLPPSEGQNWKGVTRFPFDAKVTEQDLADTYNPPFNSCVEDGGASGIMCSYNXRINGVPPGAXHNLLSTTARGRLGASTGYITSGLRAPWPIIHDVQGYAKAPEDAVADVLKAGMDVNCGGYIQTHGVSAYQQGKITGEDIDRALRNLFAIRMRLGLFNGNPKYNRYGNIGADQVCKKEHQDLALQAAQDGIVLLKNDAGALPLSKSKVSSVAVIGPNGNNASLLLGNYFGPPCISVTPFQALQGYVKDATFVQGCNAAVCNVSNIGEAVHAASGADYVVLFMGLDQNQEREEVDRLELGLPGMQESLVNKVADAAKKPVILVLLCGGPVDVTFAKNNPKIGAIVWAGYPGQAGGIAIAQVLFGEHNPGGRLPVTWYPKEFTAVPMTDMRMRADPSTGYPGRTYRFYKGKTVYNFGYGLSYSKYSHRFASKGTKPPSMRGIEGLKATASAAGTVSYDVDEMGAEACDRLRFPAVVRVQNHGPMDGRHPVLLFLRWPNATDGRPASQLIGFQSVHLRADEAAHVEFEVSPCKHFSRAAEDGRKVIDQGSHFVKVGDDEFELSFMA

SEQ ID NO: 10974 - protein, 174 aa, Pseudomonas aeruginosa UCBPP-PA14
MMNKGLELIEACWLFDAQPSQVEVVIHPQSVIHSMVDYVDGSVIAQLGNPDMRTPISYAMAWPERIDSGVSPLDMFAVGRLDFQRPDEQRFPCLRLASQAAETGGSAPAMLNAANEVAVAAFLERRIRFSDIAVIIEDVLNREAVTAVESLDQVLAADRRARSVAGQWLTRHAG

SEQ ID NO: 10975 - protein, 246 aa, Ferroplasma acidarmanus
MTRMNISVKNLRDVVDMLGTVVTEAKFKIGQQGISVNAVDPAHVAMVSLEIPKGILLEYDVESEEELSLDLEKVKGILKLASGNDSFIITKDKEKLRFEIGNIIKSISLLDNSQISTPRVPQIVAEDYIVINKGDLEKGLKAAEDVSDAIRFTMNPDSFSAKSMSDADESEMILPGDKLKEIQCHESIKSSYPLEYLLKFMRSISPNEEVKLSFKSDYPLTIEFNLGSESADRIKGRFLLAPRMES

SEQ ID NO: 10976 - protein, 161 aa, Oryza sativa (japonica cultivar-group)
MSLIRRSNVFDPFSLDLWDPFDGFPFGSGSRSSGSIFPSFPRGTSSETAAFAGARIDWKETPEAHVFKADVPGLKKEEVKVEVEDGNVLQISGERSKEQEEKTDKWHRVERSSGKFLRRFRLPENTKPEQIKASMENGVLTVTVPKEEPKKPDVKSIQVTG

SEQ ID NO: 10977 - protein, 744 aa, Listeria monocytogenes
MKTVLGKTNVTDTVSQTDLDQVTTLQADRLGIKSIDGLEYLNNLTQINFSNNQLTDITPLKDLTKLVDILMNNNQIADITPLANLTNLTGLTLFNNQITDIDPLKNLTNLNRLELSSNTISDISALSGLTNLQQLSFGNQVTDLKPLANLTTLERLDISSNKVSDISVLAKLTNLESLIATNNQISDITPLGILTNLDELSLNGNQLKDIGTLASLTNLTDLDLANNQISNLAPLSGLTKLTELKLGANQISNISPLAGLTALTNLELNENQLEDISPISNLKNLTYLTLYFNNISDISPVSSLTKLQRLFFYNNKVSDVSSLANLTNINWLSAGHNQISDLTPLANLTRITQLGLNDQEWTNPPVNYKVNVSIPNTVKNVTGALIAPATISDGGSYAEPDITWNLPSYTNEVSYTFNQSVTIGKGTTTFSGTVTQPLKAIFNAKFHVDGKETTKEVEAGNLLTEPAKPVKEGYTFVGWFDAQTGGTKWNFSTDKMPTNDIDLYAQFSINSYTATFDNDGVTTSQTVDYQGLLQEPTAPTKEGYTFKGWYDAKTGGDKWDFATSKMPAKNITLYAQYSANSYTATFDVDGKTTTQAVDYQGLLKEPKTPTKAGYTFKGWYDEKTDGKKWDFATDKMPANDITLYAQFTKNPVAPPTTGGNTPPTTNNGGNTTPPSANIPGSNTSNTSTGNSASTTSTMNAYDPYNSKAASLPTTGDSDNALYLLIGLLAVGTAVALTKKARASK

SEQ ID NO: 10978 - protein, 159 aa, Zea mays
  unsure (1)..(159): unsure at all Xaa locations
MTRGTPACKVTRRIMSYLLSYMHRPRLLADCEIYYAXATFEDPLMSMSRHVXTIKSVIYIAAKVFGESXSSXYTVLDNXCPPGKTEVAIHNXYYYKELTSPXSRRALITVLLHDVNVVMHEDCXHGKPLQNTDTVGVPLLIRILEDSRGLDMLLTHILM

SEQ ID NO: 10979 - protein, 63 aa, Prorocentrum minimum
MRGILTDWLVEVAEEYKLCADTLYLSVNYIDRFLSIHPVQRSNLQLVGIACMWIASKYEEIYP

SEQ ID NO: 10980 - protein, 119 aa, Zea mays
TVLVTLQSRAMHHISKAFTIACSKLEKIGNVETEPDAVASESKTQKEAIDLKELKRIDHILSSLKRKIGAAPPPPPYPEGYVPPSAEQEKAPDDVAASEAPPQLDPIIDQGPSKRPRFQ

SEQ ID NO: 10981 - protein, 441 aa, Glycine max
  unsure (1)..(441): unsure at all Xaa locations
EDDILKKQICSFGTENXAIIALKFKDKTTRQCKRRWNTYLQSDFKKGGWSAEEDMLLCEAQKVFGNRWTEIAKLVSGRTDNAVKNRLFTLYKKKQKYAAFAKENSTSYINSTNQVPTHHNRNHTNAPSESGVHIKKLRRADIADDAEKINFESRSXLEFELKNISSQEHHLRTEFATLITQTNXIDYHHLRTHKFSGSAQNIKLQVTFLKKXVLNICSLMIHAELISSLALKIDTXNVTQSRKNACQVLQEFLNRTNKSDIPEHKIPNLQLVDLKDMIEDLKSGNEEGQACWRKMDCYENSPGSSGYSTGSILICQSASDNLEHSLHQDIGTEMKSKQLEDEKGVKVVMPTANVDQDMVPCCMEQINNDGIVSTSSRLEFSSPLQVTPLFRSLAAGIPSPQFSESERNFLRKTLGMESPSINPSANSSQPPPCKRALLPSL

SEQ ID NO: 10982 - protein, 249 aa, Fragaria x ananassa
MAYENKPNTDLDADAQRRLGRGKIEIKRIENTTNRQVTFCKRRNGLLKKAYELSVLCDAEVALIVFSNRGRLYEYSNNSSVRETIERYKKACADTSTNGSASEATTQYYQQEAAKLHNQINALQNINRGYMAEGLSNKNIKELKGMERKLERAITRIRSKKNELLFAEIEYMQKRELDLHNNNQLLRAKIAENERQQQSIIAITGGHGSYEIVQPTQPFHEARNYFQVNALQPNIHQYSCHDQVSLQLV

SEQ ID NO: 10983 - protein, 552 aa, Methanosarcina barkeri
MSEHESASLVKTLRPFHVWALGVGIVLVGEYMGWNFTVAKGGVLGSLLAMLVAGTMYVIISLCASELGSATKLAGGPYDWARLFIGPGAAASVGLAVYMEYIALEAADAIVVASISQSIFPELQVYPVTLLVIALLTFINYRGVVAALTLNFVLTMIAFIAILAFFFSTAFGIGDIHPEYLLQGALPNGMIGLFAALQFGPWFYLGIEGAAMCAEECKHPSRAVPLGQQAGMITLLIGAAMTLYLCSVLIPADLLGVSVYPLFEAAQNSGVFIFVALLGLGTFLTCVASANGCVCDSSRLLVCSLKRQLRVIRFSAVHPKYNTPYRAVIFTVPVAIGFAFSGYLDQVITFSIVSGLLCYVLIPFSLIRFRKLFPETTSKVRPFVGPLQPYIAYFAIAIAITILSTLFWGYKYNLIFAFVSTVLRTSISATNTRNQTLKITGLKWAGPYPKAREIERSRRRQLALETNDQALESKYHSKLTGDTALVVGMLALLICVEGFIAYKILSETWEIASGFFYLYVIFIGLIVLIETIGCLKVRESIKTHMFEFKYYD

SEQ ID NO: 10984 - protein, 504 aa, Listeria monocytogenes
KPLANLKNLGWLFLDENTIKDLSSIKDLKKLKSLSLEHNGISDINGLVHLPQLESLYLGNNKLTDITILSRLTKLDTLSLEDNEISDIVPLSGLTKLQNLYLSKNHISDLRALAGLKNLDVLELFSQECLNKSINHQTNLVVPNTVKNIDGSLVTPEIISDDGDYEKPNVKWHLPEFINEVSFIFYQPVTVGKAKARFHGRVTQPLKEVYTVSYDVDGTVIKTKVEAGTRITAPKPPTKQGYVFKGWYTEKNGGHEWNFSTDYMSANDFTLYAIFKAETTEKAVNLTRYVKYIRGNAGIYKLPREDNSLKQGTLASHRCKALTVDREARNGSELWYRLKNIGWTKAENLSLDRYDKIEYDKGVTAYARVKNAPGNAVWTKPYNTAGATLVNKLSVYQGKNMRILREAKTPITTWYQFSIDGKVIGWVDTRALNTFYKQSMEIPIQLTRYVNANKGNEAYYKVPVVDSPIKWGTLAKYKNQTLIVDRTATVEGQLWYRIRTSSTF

SEQ ID NO: 10985 - protein, 148 aa, Micromonas pusilla
  unsure (1)..(148): unsure at all Xaa locations
LTEEQKQEIRXAFDLFDTDGSGTIDAKELKVAMRALGFEPKKEEIKKMIADIDKDGSGTIDFEEFLTMMTAKMGERDSREEIMKAFRLFDDDETGKISFKNLKRVAKELGENMTDEELQEMIDEADRDGDGEVNEEEFFRIMKKTSLF

SEQ ID NO: 10986 - protein, 306 aa, Pyrococcus furiosus DSM 3638
MVAIIVHGGAGTIRKEERIPKIIEGVREAVLTGWRELKKGSALDAVEEAVKVLEDNPLFNAGTGSVLTLDGKVEMDAAIMRGKTLDAGAVAGIWGVKNPISVARKVMEKTDHVLLIGEGAVKFARLMGFPEYDPTTEERRKQWEELRKKLLETGEIRHWKKLSELIKEYPEVLRSTVGAVAFDGEEIVAGTSTGGVFLKMFGRVGDTPIIGAGTYANEVAGASCTGLGEVAIKLSLAKTATDFVRLGLDAQAASEAAIRLATKYFGPDTMGIIMVDSNGNVGFAKNTKHMSYAFMKEGMKEPEAGV

SEQ ID NO: 10987 - protein, 250 aa, Burkholderia fungorum
MNRIDLEGRVVAITGGARGIGYAVAQRALNSGASVALWDVDAERLARSQRELSELGKVTAVAVELTQEAAVAQAVAQTVADHGAIDVLINCAGITGGNGTTWELEPDIWRRVIDVNLIGPYLTCRAVVPQMLRQGYGRIVNIASVAGKEGNPNASHYSASKAGLIGLTKSLGKELATKNILVNAVTPAAAKTEIFDSMSQQHIDYMLSKIPMNRFLLPEEAASLILWLSSEDCAFSTGSVFDLSGGRATY

SEQ ID NO: 10988 - protein, 448 aa, Pseudomonas syringae pv. tomato str. DC3000
MSQPWSPDSWRALPIQQQPHYPDAAHLLKVEQTLASYPPLVFAGEARELRRQFAEVTQGRAFLLQGGDCAESFMEFSAAKIRDTFKVLLQMAIVMTFAAGCPVVKVGRMAGQFAKPRSANDEIIDGVTLPAYRGDIVNGIGFDEKSRVPDPERLIQAYNQSTATLNLLRAFAQGGFADLHQVHKWNLDFIANSALADKYSQLAGRIDETLAFMRACGMDSSPQLRETSFFTAHEALLLNYEEAFVRRDSLTNDYYDCSAHMLWIGDRTRQLDGAHVEFLRGVNNPIGVKVGPSMNTEDLIRLIDILNPDNDPGRLNLIARMGANKVADHLPQLIRAVEREGRKVLWSSDPMHGNTIKASSGYKTRDFAQILGEVKQFFQVHQAEGTYAGGIHIEMTGQNVTECIGGARPITEDGLSDRYHTHCDPRMNADQSLELAFLIAETLKQVRR

SEQ ID NO: 10989 - protein, 271 aa, Thermoplasma acidophilum
MEAGSTDPPKNLIKVNEKQIEWCCDMIRLNLSVKNLKEITDLLSTIVSEAKFRVDENGMSVTAVDPAHVAMIRLEVPKEAFVEFHTDGQEEIALDIDRLKSVIRLASSSENVGITKDGEKLKFELGTINKSISLLDPSTIVTPKIPNITSEYYAVLKKSDFERGLRAAEDISDSIRFTLSQDGFKAYSHSESEESEMILPKDLITDMSCNTTIKSSYPLEYLLKFIKAISSTDSLKLSFRDDYPLSVEFYLDQNPGAKIKGLFLLAPRMEQ

SEQ ID NO: 10990 - protein, 348 aa, Mycobacterium tuberculosis H37Rv
MTQIADRPARPDETLAVAVSDITQSLTMVQAINRALYDAMAADERVLVFGEDVAVEGGVFRVTEGLADTFGADRCFDTPLAESAIIGIAVGLALRGFVPVPEIQFDGFSYPAFDQVVSHLAKYRTRTRGEVDMPVTVRIPSFGGIGAAEHHSDSTESYWVHTAGLKVVVPSTPGDAYWLLRHAIACPDPVMYLEPKRRYHGRGMVDTSRPEPPIGHAMVRRSGTDVTVVTYGNLVSTALSSADTAEQQHDWSLEVIDLRSLAPLDFDTIAASIQRTGRCVVMHEGPRSLGYGAGLAARIQEEMFYQLEAPVLRACGFDTPYPPARLEKLWLPGPDRLLDCVERVLRQP

SEQ ID NO: 10991 - protein, 156 aa, Zea mays
  unsure (1)..(156): unsure at all Xaa locations
MVKAVAVLGSSDGVKGTIFFTQEGDGPTTVTGSVSGLKPGLHGFHVHALGDTTNGCMSTGPHYNPASKEHGAPEDENRHAXGDLGNVTAGADGNGVANINVTDSQIPLTGPNSIIGRAVVVHADPDDLGKGGHELSKSTGNAGGXRLLVGIIGLQG

SEQ ID NO: 10992 - protein, 231 aa, Escherichia coli O157:H7 EDL933
MMANIWWSLPLTLIVFFAARKLAARYKFPLLNPLLVAMVVIIPFLMLTGISYDSYFKGSEVLNDLLQPAVVALAYPLYEQLHQIRARWKSIITICFIGSVVAMVTGTSVALLMGASPEIAASILPKSVTTPIAMAVGGSIGGIPAISAVCVIFVGILGAVFGHTLLNAMRIRTKAARGLAMGTASHALGTARCAELDYQEGAFSSLALVLCGIITSLIAPILFPIILAVMG

SEQ ID NO: 10993 - protein, 232 aa, Oryza sativa
MKKIFGAKKNQEPPPSIQDATDRISKRGDSVDDKIKKLDAELARYKDQIKKTRPGPAQEAIKARAMRVLKQRRMYEGQRDMLYNQTYNLDQVAFASEGLKDAQQTMTAMKAANKELKGMMKTVKLEDIDSLQDEMMDLMDVSNEIQETLGRSYNVPDDIDEEELMGELDALEADMDFESNSVPSYLQPDKESDLDSELNLPAAPTGHTPAPPNRQQEDELGLPTVPQASIRS

SEQ ID NO: 10994 - protein, 847 aa, Brassica rapa
MRSHVPNYHHPYTFFFVFILFPASGVYANTLSPTESLTISNNKTIVSRNETFELGFFTPGSSSRWYLGIWYKKIPTRTYVWVANRDNPLSRPSGSLKISSDNNLVIYDHSDTPVWSTNLTVGASRSPVVAELLDNGNFVLNSNDPEGYLWQSFDFPTDTLLPDMKLGWDKKTGLDRVLRSWKSVEDPASGDYSTKLETRGFPEYYVFNKETIIYRSGPWIGNRFSCVPEMKPIEYMVYTFIASNEEVSYAYHMTKPDVYSTLSLSYTGTIQRRNWIEQAQDWKQLWYQPKDICDNYRQCGNYGYCDSNNLPNCNCIKGFGLENGQEWALRDDSAGCVRKTRLSCDGRDGFVAVKRMKLPDTAATVLDRGIGLKECKAKCLQDCNCTAYANTDIRDGGSGCVIWNGGLFDIRMYPNGGQDIYVKLAAADLDHFKITSHGTIIGSGIGVIILLLLSIIILGYWKRKQKRFITIQTPIVDQVRSQDLLINQVVLTSERYISRENKTDDLELPLMEFEALDMATNRFSVANMLGQGGFGIVYKGMLPDGKEIAVKRLSKMSLQGTDEFKNEVRLIARLQHINLVRLLGCCVDKGEKMLIYEYLENLSLDSHLFDKIRRSNLSWPKRFDITNGIARGLLYLHQDSRFRIIHRDLKASNVLLDKNMTPKISDFGMARIFGREETEANTRKVVGTYGYMAPEYAMDGIFSMKSDVFSFGVLLLEIITGKRSKGFYNSNRDNNLLGFVWRYWKEGKGIEIVDPIIMDSSLSALCTHEILRCIQIGLLCVQERAEDRPVMSTVMVMLGSETTAIPQPKPPGFCVGRSLFETESSSSTQRDDELSVNQITLSVIDAR

SEQ ID NO: 10995 - protein, 339 aa, Nostoc punctiforme
METRFLGKSGLKISVLSFGTMTFGGSDFFQEIGATQVDEAQHLIDICLDAGVNIFDTADVYSNGLSEEILGKALGKRRSDVIIATKAYGRMGQGVNDTGLSRYHLIRACEDSLRRLDTDYIDLYQVHGFDALTPLEETLRALDSLVHSGKVRYIGCSNYSAWHLMKALSVSERLNLEHYVSQQVYYSLVARELEFELIPLSLDQGVGILVWSPLAFGFLSGKYRRGQSQPEGTRRAKIGDIGTVSDLEKGYDIVEVLHEVANNRGVSVAQVALNWLLRQSGITSVIVGARNEQQLRDNLGAAQWELTLEEVNRLNEASAITPIYPYWHQRKFGAERIPQ

SEQ ID NO: 10996 - protein, 133 aa, Betula pendula
DHECDPEEQGSCDSGCSGGLMNSAFEYTLKAGGLMREEDYPYTGTDRSTCKFDKSKIAASVSNFSVISLDEDQIAANLVKNGPLAVAINAVFMQTHVGGVSCPYICSRRLDHGVLLVGFGSAGYSPVRMKEKP

SEQ ID NO: 10997 - protein, 339 aa, Francisella tularensis subsp. holarctica
MNKKILVTGGVGYIGSHTVVELLDRDYQVVVVDNLSNSKVSVIDRVKKITNKDFDFYQLDLLGKAKLTKVFQEHDIYAVIHFAGFKAVGESVEKPLEYYHNNIQGTLNLLELMQEYKVYNFVFSSSATVYGMNNKPPFTEDMPLSTTNPYGATKLMLEDILRDLQNANNNFNITCLRYFNPVGAHSSGMIGEDPQGIPNNLMPYVAQVGAGKLAKLSIFGGDYETIDGTGVRDYIHVVDLAIGHILALEKLSQDKPSWRAYNLGSGNGYSVLEIVKAYQKALGKEIPYQIVARRTGDIAASFADVAKAKRELGFETQKTIDDICDDMLKWQKYAKENNI

SEQ ID NO: 10998 - protein, 471 aa, Bacillus cereus ATCC 14579
MKQIFQKKPIAKLMQESKQKTLARTLGALDLTMLGIGAIVGTGIFVLTGVVAAKHSGPAIILSFAIAALACAFAAFCYAEFASSVPVSGSVYTYTYATMGEVFAFLIGWDLMLEYLLATSAVANGWSAYFQSLLNGFGIHIPTILSSAPGTGKGGIIDLPAVLIILVMTVLLSRGVRESARVNNIMVFIKIAVVLIFIFAGFNYVKPENWTPFMPFGLNGVMAGAATVFFAFIGFDAVSTAAEEVKRPQRDLPIGIIASLLICTVLYIVVSLILTGIVPYGQLNISDPVAFALQFIGQDGLAGVISVGAITGITTVMLVMMYGQVRVSYAMSRDGLLPKRLAKVHPKFKTPFLNTWTTGIIAALISGLIDLNVLAHLVNMGTLSAFALVAVAVIVMRRTHPDLPRAFKAPLVPFLPALTVIFCLYLMLQLSGTAWISFGIWMVIGIAVYFLYSRKHSALNNSKKEEDVANL

SEQ ID NO: 10999 - protein, 392 aa, Dinemandra ericoides
DLEPVNPADVPVTAAGALKSYKLAAKAISRLQSLPSGNIPLPCDVLVKEVRDLTGYDRVMVYKFHEDEHGEVVSECRRSDMESYLGLHYPATDIPQASRFLFMKNKVRMICDCLSPPVEVIQDERLPQPLSLCGSTLRSPHGLHAQYMANMGTIASLVMSVTVNEDDDMMDGDQQRMARKLWGLVVCHHTSPRFVPFPLRYACEFLIQVFGVQIHKEVDLAAQVREKHILRIQTMLCDMLLRDAPVAIITQSPNVMDLVKCDGAALYYKNKFWLLGVTPTEAQIRDIAEWLLEYHRGNTGLSTDSLMEAGYPGASVLGDAVCGMAAVSITSRDFLFWFRSHTAKEIKWGGAKHDPGDKDDGRKMHPRSSFKAFLEVVKWRSLPWEDVEMDAI

SEQ ID NO: 11000 - protein, 231 aa, Fusobacterium nucleatum subsp. vincentii ATCC 49256
MIKMKKILILGSTGSIGTNALELIRNNREQYQVVGISGNKNIELLKKQIEEFKPTFIYVGTEQDALNLKKEYSFLKEVYFGESGLAELSKNSDYDIILTAVSGAIGIDATVEAIKREKRIALANKETMVSAGTYINKLLKEYPKAEIVPVDSEHSALFQSLQGFKKENVKKLIITASGGTFRGKDLAYLDNVTVEQALKHPNWSMGKKITIDSSTLINKGLEVIEAMSYLV

SEQ ID NO: 11001 - protein, 394 aa, Zea mays subsp. mays
LGSARRARLPPGEMGWPLVGGMWAFLRAFKSGKPDAFIASFVRRFGRTGVYRSFMFSSPTVLVTTGEGCKQVLMDDDAFVTGWPKATVALVGPRSFVAMPYDEHRRIRKLTAAPINGFDALTGYLPFINRTVTSSLRAWADHGGSVEFLTELRRMTFKIIVQIFLGGADQATTRALERSYTELNYGMRAMAINLPGFAYRGALRARRRLVAVLQGVLDERRAARAKGISGGGVDMMDRLIEAQDERGRRLDDDEIIDVLVMYLNAGHESSGHITMWATVFLQENPDMFARAKAEQEAIMRSIPSSQQGLTLRDFRKMEYLSQVIDETLRLVNISFVSFRQATRDVFVNGYLIPKGWKVQLWYRSVHMDPQVYPDPTKFDPSRWEGHSPRAGTFL

SEQ ID NO: 11002 - protein, 311 aa, Glycine max
MIRLNVYCSLIPSARQARPGSSYGSLIIHNHKASKFSHRISIKAKAIKDEMDGETSGSSGRSWDPGLEIEVPFEQRPVNEYSSLKDGILYSWGELGPGSFFLRLGGLWLAVFTVLGGPIAAASFNPSKEPLRFILAGGTGTLFIVSLIVLRIYLGWSYVGDRLLSAVIPYEESGWYDGQMWVKPPEILARDRLLGSYKVKPVVKLLKQTLVGTGALLVTGVMLFIFATPLENFFRTTFTKEEIKSTVQAPKVNTKLLRKEELLKLPVEVITDDDLAAAAAEAADGRPVYCRDRYYRALAGGQYCKWEDLLK

SEQ ID NO: 11003 - protein, 252 aa, Comamonas testosteroni
MNLNKQVAIVTGGASGFGAAIARRLSQAGAAVLVADLNAEGAQRMATELNAAGGRALGMACDVSKEADYRAVVDAAIAQLGGLHIVVNNAGTTHRNKPALAVTEDEFDRVYRVNLKSVYWSAQCALPHFAQQGHGVMVNVASTTGVRPGPGLTWYSGSKAAMINLTKGLALEFARSGVRINAVNPMIGETPMMADFMGMEDTPANRERFLSRIPLGRFTRPDDVASAVAFLASDDASFLTGVCLDVDGGRNI

SEQ ID NO: 11004 - protein, 442 aa, Pirellula sp.
MNTDSRPNNPSEPAKLRRDVGLFGAMMMGLGSIVGTGVFVSIGIAAGITGPSVVLAILVAGLVATFNGLSSAQLAAAHPVSGGTYEYGYRWLTPSMGFTAGWMFLCAKSASAATAALGFAGYALQLFQFDHDDWIVPLAIGAVVATTLLLLGGIRRSNWTNIAIVSMTLIALASFVIAGLPFAWREGSSNLTPFFASDSPAIATRQFLEACALMFVAYTGYGRIATLGEEVHNPRRTIPRAIIVILLVSSLLYAIVGGIAVAAAGIDVWSSTSQQTAPLQLVANHLNSPLVAKLVAIGAVTAMLGVLLNLILGLSRVVFAMGRRGDLPRGLATVSTQNSNPSGAVIAVGIGVGTLALIGDVETTWSFSAFTVLVYYALTNLAATRLTADERLFSPIVPWLGLASCLGLAFWVQPKIWIIGLSLIAVGLVFQQCMKRSDTSAS

SEQ ID NO: 11005 - protein, 243 aa, Streptococcus mutans UA159
MALLKSPIFGICFSLILYTIGQDLFKKSKGFFLLQPLFFAMVAGIIVLVLLAKGLGTDVKTLYTQAYKPGGDLIFWFLNPATIAFAVPLYKKNDAVKKYWKEIISSLIIGMVVSLIIIVAISKAIGLSQASTASMLPQAATTAIALPIAHAIGGNTAITAMACILNAVIIYALGKKLVALFHLNKSEIGVGLGLGTSGHTVGAAFALELGELQGAMAAIAVVVIGLVVDLVIPIFSYMIGLVH

SEQ ID NO: 11006 - protein, 140 aa, Triticum aestivum
LHPSIHPSLPRSAARMVDAWWPLLAAAVPAIVAGQAIRVKRRRDEEQRLKAARGREKSSDEVFVCERVCTSKRMLKKVGAFSKDPIPDTCVTVCGVSELDACADACGRTVCVNQHQVPNWNDVCLKRCQSECLKLSSTVM

SEQ ID NO: 11007 - protein, 346 aa, Sinorhizobium meliloti
MAKALVLEKKGQLSLRDIPVRRDLSPTDVLIGIRTVGVCGSDVHYYTHGKIGPFVVNEPMILGHEAAGVVLEVGSQVRHLKKGDRVCMEPGIPDLSSRSSKLGIYNVDPSVRFWATPPVHGCLTPEVVHPAAFTYRLPDHVSFAEGAMVEPFAIGVQAALRAGIRPGDVGAVMGAGPIGMMTALAALAGGCSKVYVADLAQPKLDVIGAYEGIETINVRQQAVSEALAGATGGWGADVVFECSGAAPAILALPSLARPGGTVVLVGMPVEPVPFDIVGMQAKELRIETVFRYANVYDRAIELIASGKVDLKPLISATIPFDESIAAFDRAVEARPTDVKIQIEMPA

SEQ ID NO: 11008 - protein, 357 aa, Xylella fastidiosa Temecula1
MSKKILILPGDGIGHEIVAEAVKVLEHVNVRHTLNMRLSFDALGGAAYEKYGSPLADETLARAREADAVLLGAVGGPQWDTIDPALRPERGLLKIRAQLGLFANLRPALLYPQLADASTLKPEVVAGLDILIVRELTGGLYFGQPRGSRISKNGEREAFDTLPYCESEIRRILKVGFEMARLRGKKLCSVDKANVLASSQLWRTVAGEMAKDYPDVTLSHMYVDNAAMQLVRYPKQFDVIVTENMFGDILSDQASMLTGSIGMLPSASLDANNKGMYEPCHGSAPDIAGQGVANPLATILSVAMLLRYGMGYIKTADAIEYAVGVVLDSGLRTADIWSEGMTKVGTVAMGDAVVAAL

SEQ ID NO: 11009 - protein, 398 aa, Triticum aestivum
  unsure (1)..(398): unsure at all Xaa locations
PTRPTPLTPARPAPSAPQLYPSLTLDGLAPPAIPRPPVXPGPVGAAALPVARHPGPDARLDAPLPGLPRGAGAVARRPARPPRRSVAPIGALGQLHWGLARAVAPLNLGRRHLPFPFAVPASPAVPAPEPLHYGHALSVPLPRLVALLGPYTRFSAHSVAGSEGLAGGVRGDVEAAAYXTAVVPNVVEDGSEVARSTASGAANGPVGNLWCGVITVDRLRWRQEVRSTSRQPGAAEAVVRPXNLRRIKKATAVTKTXEKAATGVLSXVVKVSSYVTSSLVNSKAGKGFFSLLPGVGVLASLDGFGKISDAVEVAGKDVLSTSSTVTTGLVSHKYGEKAAAATNEGLDAAGHAIGTAWAVFKLRQALNPKSVLKPTSLAKSTVKAGAAELRAKSSSKSK

SEQ ID NO: 11010 - protein, 157 aa, Oryza sativa
  unsure (1)..(157): unsure at all Xaa locations
MHYCPSLQAEASYMPWPPATPPPPAAAAANSTSTAAANNSSSSSSTTAPPQQPTAFPMVRPSKRSQIMKLIHIALISSSSXDPFLQYGVTPGSLRPQECGGRCAYRCSATAYRKPCMFFCQKCCASCLCVLPGTYGNKQSCPCYNDWKTKRGGPKCP

SEQ ID NO: 11011 - protein, 74 aa, Triticum aestivum
KTGMCMALVFLPFAIANALTAKINNGTPLADELLVILLYCATSVGLYMHLAISVCHEIKDALGIYCFRIARKEA

SEQ ID NO: 11012 - protein, 63 aa, Lithospermum erythrorhizon
EFGLLGLKHKEHIAAYGEGNERRLTGKHETADINTFKWGVANRGASIRVGRDTEKEGKGLVRI

SEQ ID NO: 11013 - protein, 782 aa, Neurospora crassa
MAHNNSEIDDKTSSWPPEKVAADFHGIDEKHPDGQGSVDPESLEGETGPLETAEDIVTHVIAVDDDPSLSPWTFRMFFVGVGLSVFGGVLQEIMYFKPQVVYVSVMFLTVLAQALGTALSQLIPRKGAIGRFLNPFPWNRKEHTAAVLMASAASVSALSTEALSVQELWYGGYPSTAAGVFITLSSQLIGYGAAGMMRSVLLYPTKMLYPANLPITTVMETLHKPKAETAKRFKVFWIIFVAIFCWEWFPEYIFPILSAVSIFCLADQNNAVFTNLFGGSQGNEGMGFLNICFDWNYIAGFGSPLWMPLQTLTNSFIGYLGGIILSMGLYYSNIWRGMDFPFMSQLLYDGSSNSTNYVVYNETLIMNSDFTIDTDAVDKVGVPYLTATYVNYLITTNASLTATLIHMLLWNYDDVSKAWSWITLDKLKSLLKPSTYFFWKSTGARTEVEKEAIRQDPTIDPHYRLMVDYDEVPSSWYFVVFVISIIVGIVCLYVMKSTLPWWGFIIGTLLLIVLIIFFGAQSAITGFTVNMQPVMQMLAGYMFPGKPLANMYFTTYTYNGLSQGILLLRDLKLAQQNKLSPRATFTTQMVGCVIGALLNYVMMISIVKNQAPLLKSAEGSNVWSGAQVQQFNTLAIAWAIAPKMFSIGARYQWVTAAYLVGFLAPLPFYIMHRFVFPRQRIWSYLNTSIILWYLGELFVGLNASITSYYILGAFGQFYLRRYRPQWFVKWNYLVSAALDGGTQVMIFIATFAVFGGSGKAVPFPEWAGNHPNNLDYCKYNSS

SEQ ID NO: 11014 - protein, 327 aa, Xanthomonas campestris pv. campestris str. ATCC 33913
MSSPITLIEAITQALAWELEHDPAVLVLGEDVGVNGGVFRATAGLQQRFGSARVLDTPLDETTIAGLSVGLAAQGMKPVAEAQFDGFVYPMVDHLICHAARLRNRTRGRLHCPMVLRVPWGGGIRAPEHHSEANEAIFTNVPGLRVVLPSSPQRAYGLLLAAIRDPDPVIYMEPKRIYRQYKEVVANDGEALPLDVCFVLRDGTDVTLVTWGAQVKEALEAADKLASEGISAEVIDVATLRPLDFDTIAESVAKTGRCVIVQEAPRTAGFGAEIAAQLAEKSMYDLLAPVERVTGYDTHIPLFRLEMKFLPSVERIVTAARRAVAAG

SEQ ID NO: 11015 - protein, 630 aa, Listeria monocytogenes EGD-e
MKEKHNPRRKYCLISGLAIIFSLWIIIGNGAKVQAETITVPTPIKQIFSDDAFAETIKDNLKKKSVTDAVTQNELNSIDQIIANNSDIKSVQGIQYLPNVTKLFLNGNKLTDIKPLANLKNLGWLFLDENKVKDLSSLKDLKKLKSLSLEHNGISDINGLVHLPQLESLYLGNNKITDITVLSRLTKLDTLSLEDNQISDIVPLAGLTKLQNLYLSKNHISDLRALAGLKNLDVLELFSQECLNKPINHQSNLVVPNTVKNTDGSLVTPEIISDDGDYEKPNVKWHLPEFTNEVSFIFYQPVTIGKAKARFHGRVTQPLKEVYTVSYDVDGTVIKTKVEAGTRITAPKPPTKQGYVFKGWYTEKNGGHEWNFNTDYMSGNDFTLYAVFKAETTEKAVNLTRYVKYIRGNAGIYKLPREDNSLKQGTLASHRCKALTVDREARNGGKLWYRLKNIGWTKAENLSLDRYDKMEYDKGVTAYARVRNASGNSVWTKPYNTAGAKHVNKLSVYQGKNMRILREAKTPITTWYQFSIGGKVIGWVDTRALNTFYKQSMEKPTRLTRYVSANKAGESYYKVPVADNPVKRGTLAKYKNQKLIVDCQATIEGQLWYRIRTSSTFIGWTKAANLRAQK

SEQ ID NO: 11016 - protein, 757 aa, Bifidobacterium longum DJO10A
MSESTYPSVKDLTLEEKASLTSGGDAWHLQGVESKGIPGYMITDGPHGLRKSLASSAGETDLDDSVPATCFPPAAGLSSSWNPELIHKVGEAMAEECIQEKVAVILGPGVNIKRNPLGGRCFEYWSEDPYLAGHEAIGIVEGVQSKGVGTSLKHFAANNQESDRLRVDARISPRALREIYFPAFEHIVKKAQPWTIMCSYNRINGVHSAQNHWLLTDVLRDEWGFEGIVMSDWGADHDRGASLNAGLNLEMPPSYTDDQIVYAVRDGRITPAQLDRMAQGMIDLVNKTRAAMSIDNYRFDVDAHDEVAHQAAIESIVMLKNDDAILPLNAGPVANPSAMPQKIAVIGEFARTPRYQGGGSSHITPTKMTSFLDTLAERGIKADFAPGFTLDLEPVDPALESEAVETAKNADVVLMFLGLPEAAESEGFDRDTLDMPAKQITLLEQVAAANQNVVVVLSNGSVITVAPWAKNAKGILESWLLGQSGGPALADVIFGQVSPSGKLAQSIPLDINDDPSMLNWPGEEGHVDYGEGVFVGYRYYDTYGKAVDYPFGYGLSYATFEITGVAVAKTGANTATVNATVTNTSDVDAAETVQVYVVPGKADVARPKHELKGFTKVFLKAGESKTVTIDLDERAFAYWSEKYNDWHVEAGEYAIEVGVSSRDIADTVAVALDGDGKTQPLTEWSTYGEWEADPFGAKIVAAVAAAGEAGELPKLPDNAMMRMFLNSMPINSLPTLLGEGGKKIAQFMVDEYAKLSK

SEQ ID NO: 11017 - protein, 140 aa, Oryza sativa
QLVICESHLAEIGIGLTGFGVFFSFLGIIFFFDKGLLAMGNILFLSGLGLTIGLKSTLQFFTKPKNYKGTISFGAGLLLVLIGWPFFGMLLEAYGFIVLFSGFWPTLVVFLQKIPFIGWIFQQPFVASYLGSYRGKRVPV

SEQ ID NO: 11018 - protein, 370 aa, Bradyrhizobium japonicum USDA 110
MATHKLLLLPGDGIGPEVMGEVKRLIDWLNSAGIAKFETDTGLVGGSAYDAHKVSISEGDMAKALAADAIIFGAVGGPKWDAVPYEVRPEAGLLRLRKDLGLFANLRPAVCYPALADASSLKREAVEGLDIMIVRELTGGVYFGEPKTITDLGNGQKRAIDTQVYDTYEIERIARVAFDLAKKRKNKVTSMEKRNVMKSGVLWNEVVTQVHKREYPDVTLEHQLADSGGMMLVKWPKQFDVIVTDNLFGDMLSDIAAMLTGSLGMLPSASLGEVDVKSKKRKALYEPVHGSAPDIAGKGLANPIAMISSFGMALRYSFDMGALADKVDAAIAAVLASGLRTADIKSEGTTAASTTQMGEAILKELQKLHA

SEQ ID NO: 11019 - protein, 485 aa, Oryza sativa
  unsure (1)..(485): unsure at all Xaa locations
MEHHHHKPGLRVRLRITAARRXARGCPRACSPPAASRRAATRPTPSTRSRAARSAGGTAGRRGPRRXSSSAFSCPEKFRNFQLQEEYDTYDDEVHFLVQLPFLWSRTKIIEIVAAKDVIFALAQSGLCGAFNRATNKRICYLNISPDEVIRSLFYNKNNESLITVSVYESDRFSSLKCRTTPIEYIRRGQLNDGFPLFETESLKYPGFVEFDDVNGKVLTFSAQDSTYKVFDLKNYNFLYSICDKNIQEIKISPGIMLVIYQKSANHVPLKILSIEDGTPLKTFTQLLHRSRKVDFIEQFNEKLLVKQDKENLQIIDVRNSNLIEVNKTEFMTPSAFIFLYENNLFLTFCNRTVAAWNFRGELVTSFDDHELWHSNCNTNNIYITADQDLIISYCKASKEGEGIAPPTGSINMSNIFTGKCVAKISPXRPYSHNCSSKKRXXSSRSTIRSTVSDALEDITALFYDEDRNEIYTGNSKGLVHVWSN

SEQ ID NO: 11020 - protein, 908 aa, Pantoea agglomerans
MTKYSLRARMMILILAPTLLIGLLLSTFFVVHRYNELQEQLVDAGASIIEPLAVASEYGMTFRSRESVRQLVSLLHRRHSDIVRSITVFDAQNNLFVTSNYHHNFAQLQLPKGVPMPTDLMLTRRGNSLILRTPILSESQYPDQNATDPVPQDNNLGYVAIELDLQSVRLRQYKEVFISTLLLLLCMCIAILFAYRLMRDVTGPIRNMVNTVDRIRRGQLDSRVEGFMLGELHMLKNGINSMAMSLTAYLEEMQQNIDQATSDLRETLEQMEIQNVELDLAKKRAQEAARIKSEFLASMSHELRTPLNGVIGFTRQMLKTEMSVTQTDYLQTIERSANNLLTIINDVLDFSKLEAGKLVLEHIPFSLRETLDEVIVLLAPSAHEKGLELTLDVHNDVPEQVIGDSLRLQQIITNLLGNAIKFTETGNIDIRVELRGQQDHQVELEVQIHDTGIGISERQQSQLFQAFRQADASISRRHGGTGLGLVITQKLVKEMGGDICFHSQLNRGSTFWFHITLELHEGMLSLPSSLPDLRGKTLGYIEANPMAAEATLNMLSVTSLVITHSPTLAQLPKKNYDFLLVGVPIPFRDNLAQHESKLKAALNIAGRVILALPCQSQINAEQLKQQGAIGCLIKPITSNRLFPLLRMEPPQRLLAAPERKRLPLTVMAVDDNPANLKLIGTLLAEQVEKTLLCESGEEALALARDNVLDLILMDIQMPNIDGIRTGELIRQLPHHNSTPIVAVTAHAVSGEREHLLQAGMDDYLAKPIDEAMLTRVLARYYSGEPAAEPLLSLDWPLALRQAANKEDLARDLLQMLLDFLPQVSERVQAVLDGTPDDSILDLIHKLHGSCSYSGVPRLKQLCFYLEQQLRKGVGNEELEPEWLELLDEIELVSQAARSHLESDRPTTS

SEQ ID NO: 11021 - protein, 346 aa, Neisseria meningitidis MC58
MKAMVYHGANDIRFEEKPRPQIIDPTDAVVKIVKTTICGTDLGIWKGKNPEVADGRILGHEGIGIVEEVGEAVKNIKVGDKVIISCVSKCCTCDNCKTQLYSHCRNGGWILGYMIDGTQAEYVRTPYADNSLVPLPDNVNEEIALLLSDALPTAHEIGVQYGDVKPGDTVFIAGAGPVGMSALLTAQLYSPAAIIVCDMDENRLKLAKELGATHTINPASGEVSKQVFAIVGEDGVDCAIEAVGIPATWNMCQDIVKPGGHIAVVGVHGQSVDFKLEKLWIKKLAITTGLVNANTTEMLMKAISSSSVDYTKMLTHHFKFSELEKAYDVFKHAAENQVMKVVLEAD

SEQ ID NO: 11022 - protein, 435 aa, Triticum aestivum
  unsure (1)..(435): unsure at all Xaa locations
SFTDKSEASTNEKIHSRVARAQSKSDEPASRASSPRPTGSSSPRLVQRKAESERRSRPPVSPESPSKKSNEAASPRRGARSKPSQVRSNRDNEASQSPGRRISLAKQIDVSVMDCQSPLAARSSFIDPNTPSQKSPSSILGSDHKIHSLENALSPVSVLDTSFYHKSISDSFKDGETHTSDECWNXTACRTRRKSKTSSEVSQIKXENLEALIQKLEQLQSMNDEAANSKDHQYIYEILLASGLLHKELSFAAMPAQLSPSSCPINPELFLILEQTKPHFISATQAVTGAKKSSDPNMEKLHRRIVFDLVNEIIAQKMNIYSSASGTAKLLRSRKLSGWRLFKELCTEVDRLLSESSAAKCSEEDEDENIPLSEDALYEMKDWGSPEGELQGMVLDIERSIFRDLIDEVIGCEATERMQAGQWKLRRQLSFSSIN

SEQ ID NO: 11023 - protein, 304 aa, Yersinia pestis CO92
MFTVIPILIVVALIVVLSAIKIVPQGFQWTVERFGRYTKTLMPGLNIVVPFMDRVGRKINVMEQVLDIPSQEIISRDNANVAIDAVCFIQVIDPVKAAYEVSNLELAIVNLTMTNFRTVLGSMELDEMLSQRDNINSRLLHIVDEATNPWGIKITRIEIRDVRPPTELISAMNAQMKAERTKRADILEAEGVRQAAILRAEGEKQSQILKAEGERQSAFLQAEARERAAEAEAQATKMVSEAIAAGDIQAINYFVAQKYTDALQHIGSANNSKVIMMPLEASSLMGAIGGIAELIGESKNSRGK

SEQ ID NO: 11024 - protein, 896 aa, Xanthomonas campestris pv. campestris str. ATCC 33913
MHSHPAPHARVPHRALARGLLLALGVAAGSTHAATPPPPYLDPTQPLQARAADLVSRMTLEEKAAQMQNAAPAIPRLQVPEYDWWNEALHGVARAGGATVFPQAIGLAATFDTPLMAEVATAISDEARAKHHAFLAGGEHKRYQGLTFWSPNINIFRDPRWGRGQETYGEDPFLTARMGVTFVQGLQAQQGPYRKLDATAKHYAVHSGPEADRHHFDVHPSERDLYETYLPAFQALVQEGHVAAVMGAYNRVNGESASASTRLEGILRRDWGFDGYIVSDCAAIRDIWQNHKIVPTPEAAAALGVKHGTDLDCGDTYAALPAAVRAGLIDEATIDRSLTRLMAARLRLGMFDPPAKVPWAQTPASANQSPQHDALARRTARESLVLLKNDGLLPLKPTLKRIAVVGPTADDPMSLLGNYYGTPAAPVTILQGIRDAAPQAEVVYARGSDLVEGREDPNAAAPIDARYLRPAAGASQNGLTGDYFRGRALAGQPVLTRIDPRIAFRWDRNAPTDDAVGRGELQPGQALGKDDFSVRWHGQLLPPVSGNYELQIAADDGVRLYLDGKPLIDQWSDAPRMRSSTATVALQAGKAYDLRVEYYEATRDAGVRLAWRMPGAKPPLQEAVDAARNADVVVFVGGLTGDVEGEEMDVNYPGFAGGDRTDTRLPKPQRELLQALQATGTPVVAVLTTGSALAIDWAQQHVPAILLAWYPGQRGGTAVGDVLFGQASPGGRLPITFYKEDERLPAFDDYAMRGRTYRYFDGKPLYPFGHGLAYTQFAYSNLRLDRTTVAADGTLRATVSVKNTGQRAGDEVVQLYLHPLNPQRERARKELRGFQRITLQPGEHREVSFNITPREALRIYDEQRKAYAVDPGAYELQIGASSADIRSKQRFTVTAN

SEQ ID NO: 11025 - protein, 338 aa, Pasteurella multocida
MAILVTGGAGYIGSHTVVELLNANKDVVVLDNLCNSSPKSLERVAQITGKQVKFYQGDILDTALLQKIFAENQIQSVIHFAGLKAVGESVQKPAEYYMNNVTGSLVLIQEMKKAGVWNFVFSSSATVYGDPEIIPITESCKVGGTTNPYGTSKFMVEQILKDIAKATPEFSITILRYFNPVGAHESGLIGEDPNGIPNNLLPYISQVAIGKLPQLSVFGSDYETHDGTGVRDYIHVVDLAIGHLKALDRHEGDAGLHIYNLGTGSGYSVLDMVKAFEKVNDIKIPYKLVDRRPGDIATCYSDPSLAKTELNWTAARGLEQMMKDTWHWQKKNPKGYRD

SEQ ID NO: 11026 - protein, 257 aa, Ralstonia solanacearum
MATLAGHHAVVTGAGRGIGAAIASRLAADGAALTLMGRNAAVLEATAATLPAAARAQVVTCDVADAASVAQAFASARAGRGPVSILVNNAGQAESAPFGKTTLEHWQRMLAVNLTGTFLCTQAALADVQACGRGRIVNVASTAGLRGYAYVSAYAAAKHGVIGLTRSLALELAARGVTVNAVCPGYTDTDIVRESIDRIVARTGRSAEQARAELVRGNPQGRLVTPEEVADAVAWLCSGGAASINGQAISVSGGEVM

SEQ ID NO: 11027 - protein, 228 aa, Gossypium populifolium
  unsure (1)..(228): unsure at all Xaa locations
FTSLCHTDVYFWEAKGQTPLFPRIFGHEAGGIVESVGEGVTHLKPGDHVLPVFTGECGNCRHCKSKESNMCDLLRINTDRGVMLSDGKTRFSINGKPIYHFVGTSTFSEYTVAHVGSVAKINPAAPLDKVCILSCGISTGLGATLNVAKPAKGSTVAIFGLGAVGLAAAEGARIAGASRIIGVDLNPNRFEEAKXFGCTEFVNPKDHNKPVQEVLAEMTNGGVDRSVE

SEQ ID NO: 11028 - protein, 500 aa, Mentha x piperita
MELQISSAIIILVVTYTISLLIIKQWRKPKPQENLPPGPPKLPLIGHLHLLWGKLPQHALASVAKQYGPVAHVQLGEVFSVVLSSREATKEAMKLVDPACADRFESIGTKIMWYDNDDIIFSPYSVHWRQMRKICVSELLSARNVRSFGFIRQDEVSRLLGHLRSSAAAGEAVDLTERIATLTCSIICRAAFGSVIRDHEELVELVKDALSMASGFELADMFPSSKLLNLLCWNKSKLWRMRRRVDAILEAIVEEHKLKKSGEFGGEDIIDVLFRMQKDSQIKVPITTNAIKAFIFDTFSAGTETSSTTTLWVMAELMRNPEVMAKAQAEVRAALKGKTDWDVDDVQELKYMKSVVKETMRMHPPIPLIPRSCREECEVNGYTIPNKARIMINVWSMGRNPLYWEKPETFWPERFDQVSRDFMGNDFEFIPFGAGRRICPGLNFGLANVEVPLAQLLYHFDWKLAEGMNPSDMDMSEAEGLTGIRKNNLLLVPTPYDPSS

SEQ ID NO: 11029 - protein, 696 aa, Synechocystis sp. PCC 6803
MDSGHGAQSRIKLGQTGYKLSTYFCKSGPNWENQPQIHWNSLFSTVKIQLSLFPSSFHLIMVTPINYHSIHCLADIWAITGENFADIVALNDRHSHPPVTLTYAQLREEITAFAAGLQSLGVTPHQHLAIFADNSPRWFIADQGSMLAGAVNAVRSAQAERQELLYILEDSNSRTLIAENRQTLSKLALDGETIDLKLIILLTDEEVAEDSAIPQYNFAQVMALGAGKIPTPVPRQEEDLATLIYTSGTTGQPKGVMLSHGNLLHQVRELDSVIIPRPGDQVLSILPCWHSLERSAEYFLLSRGCTMNYTSIRHFKGDVKDIKPHHIVGVPRLWESLYEGVQKTFREKSPGQQKLINFFFGISQKYILAKRIANNLSLNHLHASAIARLVARCQALVLSPLHYLGDKIVYHKVRQAAGGRLETLISGGGALARHLDDFYEITSIPVLVGYGLTETAPVTNARVHKHNLRYSSGRPIPFTEIRIVDMETKEDLPPETQGLVLIRGPQVMQGYYNKPEATAKVLDQEGWFDSGDLGWVTPQNDLILTGRAKDTIVLSNGENVEPQPIEDACLRSAYIDQIMLVGQDQKSLGALIVPNFDALQKWAETKNLQITVPEPSASSEGMQASGLYDPQVVGLMRSELHREVRDRPGYRADDQIKDFRFIPAPFSLENGMMTQTLKLKRPVVTQTYQHLIDEMF

SEQ ID NO: 11030 - protein, 377 aa, Oryza sativa
  unsure (1)..(377): unsure at all Xaa locations
XGGTLSHSLQPHPNRGPTTPKTITAPPPPPPQPQPQAAKKSRRGPRSRSSQYRGVTFYRRTGRWESHIWDCGKQVYLGGFDTAHAAARAYDRAAIKFRGVEADINFNLSDYEEDMRQMKSLSKEEFVHVLRRQSTGFSRGSSKYRGVTLHKCGRWGARMGQFLGKKYIYLGLFDSEVEAARAYDKAAIKCNGREAVTNFEPSTYDGELPTDAAAQGADVDLNLSISQPAASQQSPKRDSGSLGLQIHHGSFEGSEFKRAKNDAAPSELASRPHRFPLLTXXIRQSGLPNLRGSCSKLGMEADPAPPHTLPLPFFSSSSSSPSSSSAAASSGFSNATTAAAAQHTATLRFDPTAPSSSSSSRHHHHHXXKGKKPSPPL

SEQ ID NO: 11031 - protein, 230 aa, Zea mays; identical to SEQ ID NO: 5218

SEQ ID NO: 11032 - protein, 305 aa, Miscanthus sinensis var. sinensis
IESVGEGVTDVAPGDHVLPVFTGECKECPHCKSAESNMCDLLRINTDRGVMIGDGKSRFSINGKPICHFVGTSTFSEYTVMHVGCVAKINPQAPLDKVCVLSCGISTGLGASINVAKPPKGSTVAIFSLGAVGLAAAEGARIAGASRIIGVDLNPSRFEEARKFGCTEFLNPKDHKKPVQEVLAEMTNGGVDRSVECTGNIYAMIQAFECVYDGWGVAVLVGVPHKDAEFKTHPMNFLNERTLKGTFFGNFKPRTDLPNVVELYMKKELEVEKFITHSIPFAEINKAFDLMAKGEGIRCIIRMEN

SEQ ID NO: 11033 - protein, 464 aa, Salmonella typhimurium LT2
MKNASTASGASVSDAASKNEPTLQRGLQNRHIQLIALGGAIGTGLFLGIGPAIQMAGPAVLLGYGVAGIIAFLIMRQLGEMVVEEPVSGSFAHFAWKYWGPFAGFLSGWNYWVMFVLVGMAELTAAGIYMQYWLPDVPTWVWAAAFFIIINAVNLVNVRLYGETEFWFALIKVLAIIGMIGFGLWLLFSGHGGEHASIDNLWRYNGFFATGWHGLLLSLAVIMFSFGGLELIGITAAEARDPQKSIPKAVNQVVYRILLFYIGSLVVLLALYPWVEVKSNSSPFVMIFHNLDSNVVASALNFVILVASLSVYNSGVYSNSRMLFGLSVQGNAPKFLTRVSHRGVPVNSLILSGAITSLVVLINYLLPQKAFSLLMALVVATLLLNWIMICLAHLRFRAAMRRKGRETQFKALFYPAGNYLCIAFLALILVLMCTMDDMRLSAILLPVWIVFLFIAFTVLRRKAH

SEQ ID NO: 11034 - protein, 334 aa, Burkholderia fungorum
MLARRGGAPLDGDTPHAPQGASPQKRIMATGFYSHADCLLHDMGQWHPECPARLQAIEDQLIASRIDSLIERESAPLADEAALLRVHTQAHIDYIRSRSPPEGMAEIDPDTTMNPHTLQAALRAAGAAVAATDAVIEGRYDNAFCSVRPPGHHAEPARAMGFCFFNNIAIAARHALEVHGLGRVAIIDFDVHHGNGTEAAFSGDSRVLMCSFFQHPFYPFTGADNQAPNMCNVPLPARSKGMAVREAVDMLWLPRLHEFKPEMLFISAGFDAHREDDLGNMGLVEDDYAWITDQMREIAKRYSRGRIVSCLEGGYNLSALGRSVVAHMRSLAGI

SEQ ID NO: 11035 - protein, 342 aa, Mesembryanthemum crystallinum
MELYEIVKDIGSGNFGQAKLVRDKWTNEFVAVKFIERGSKDDEHVQRKLMNHSSLKHPNIIRFKEVLLTPTHLAIVMEYAAGGELFERICNAGRFREDEARFFFQQLISGVSYCHSMQICHRDLKLENTLLDGSPAPRVKICDFGYSKSSVLHSQPKSAVGTPAYIAPEVLSKREYDGKIADVWSCGVTLYVMLFGAYPFEDPDDPKNFRKSLVRILSVQYCIPDNIPISMECRHLLSRIFVANPEKRITIPEIKNHPWFQKNLPMELMEGGSWQSHDINHPSQNIGEILSIIQEARQPAELPSTGGLQIGGTLDFDDLDVDLDVDVDLDDIESSGEFVCPM

SEQ ID NO: 11036 - protein, 394 aa, Zea mays subsp. mays
LGAERRARLPPGEMGWPLVGGMWAFLRAFKSGKPDAFIASFVRRFGRTGVYRSFMFSSPTVLVTTAEGCKQVLMDDDAFVTGWPKATVALVGPRSFVAMPHDEHRRIRKLTAAPINGFDALTGYLPFIDSTVTSSLRAWADHGGSVEFLTELRRMTFKIIVQIFLGGADQATTRALERSYTELNYGMRAMAINLPGFAYRGALRARRRLVAVLQGVLDERRAARAKGVSGGGVDMMDRLIEAQDERGRRLDDDEIIDVLVMYLNAGHESSGHITMWATVFLQENPDMFARAKAEQEAIMRSIPSSQRGLTLRDFRKMEYLSQVIDETLRLVNISFVSFRQATRDVFVNGYLIPKGWKVQLWYRSVHMDPQVYPDPTKFDPLRWEGHSPRAGTFL

SEQ ID NO: 11037 - protein, 342 aa, Sinorhizobium meliloti
MAWQPAENRYEKMKYNRCGRSGLKLPAISLGLWHNFGGDTPHERKVDMCRTAFDLGITHFDLANNYGPPPGSAEIAFGEIMRSDFAALRDELIISSKAGYDMWPGPYGEWGSRKYLVASCDQSLKRMGLDYVDIFYSHRFDPETPLEETCGALDHIVRSGRALYVGISSYNSQRTREAAVILKEMGTPCLIHQPSYSMLNRWVEDDGLVDTLEELGVGSIVFSPLAQGMLTTKYLNGIPEDSRAAQNHFLKKDFIRPGIIDNIRKLNAIAERRGQTLAQMALAWVLRGGRITSALIGASRSAQIVDCVKALENDTFTPEELSEIDLYAREADVNLWAKSAEL

SEQ ID NO: 11038 - protein, 121 aa, Oryza sativa
  unsure (1)..(121): unsure at all Xaa locations
XXLXRXSXFQMQDGRLXXFXLGPXGLIFDRXEIWNXKLXCRQNKXXXQXEXXTXIEMQEPXSXTXPLRNMNSXTKASPFFEQVTITLXXEXPVVVEXKIAEXXNIRFXXXPKIXEXEEXNS

SEQ ID NO: 11039 - protein, 351 aa, Triticum aestivum
MYSWEMLSFNIHDGFLEAIVRGNRSGLLTQADYNNLCQCETLDDIKMHLSATEYGPYLQNEPSPLHTTTIVEKCTLKLVDEYKHMLCQANEPLSTFLQYITYGHMIDNVVLIVTGTLHERDVNELLEKCHPLGMFDSIASLAVAQNMRELYRLVLVDTPLAPYFSECITSEDLDDMNIEIMRNTLYKAYLEDFYKFCAKLGGATAEIMCNLLSFEADRRAVNITINSIGTELTRDDRRKLYSNFGLLFPYGHEELAVCEDVDQVRGVMEKYPPYQSIFAKISYGESQMLDKAFYEEEVKRLCQSFEQQFHYAVFFAYMRLREQEIRNLMWISECVAQNQKNRVHDSVVPIF

SEQ ID NO: 11040 - protein, 342 aa, Lupinus albus
MADLRSTFLNVYSVLKSELLHDPAFEFSPDSRQWLDRMLDYNVPGGKLNRGLSVIDSYRLLKDGHELNDDEIFLASALGWCIEWLQAYFLVLDDIMDNSHTRRGQPCWFRVPKVGMIAANDGVLLRNHIPRILKKHFRGKPYYADLLDLFNEVEFQTASGQMIDLITTLEGEKDLSKYTLSLHRRIVQYKTAYYSFYLPVACALLMVGENLDNHIDVKNILVDMGTYFQVQDDYLDCFGAPETIGKIGTDIEDFKCSWLVVKALELSNDEQKKVLYDNYGKPDPANVAKVKALYDELNLQGVFTEYESKSYEKLVTSIEAHPSKAVQALLKSFLGKIYKRQK

SEQ ID NO: 11041 - protein, 347 aa, Chloroflexus aurantiacus
MRAARLHEYDEHLNVQLQLEDVPLPKITKPGDVIVRIGAAGLCRTDLHIIEGVWKDIQDPQRTLLPYILGHENAGWVEEVGPGVTSVKVGDPVICHPLRSCGVCLGCRRGEDMYCEHGSFPGLNCDGGFAEYMLTNERALIKLNPNVAPVDVAPLADAGITAYRVAKKAARKLNPGQYCVILGVGGLGHIALQSVRELCGARIIAIDRSEAARQLARNLGAHYVLDGSDTIVQEVKELTHGGAHVVIDFVGELGAEQVSWQMLRQGGTHFVVGYGGAVHVPTVHMIITEIAIEGSLVGNYVELVELMELNAEGRVKLHGQQYRLDQINQAIDDFKNRRIAGRAVIVP

SEQ ID NO: 11042 - protein, 897 aa, Listeria ivanovii
MKRNSSLKKVLPVLLITIIAMCMNTNLEIKVQAASISNPMPINQIFPDTNLAEVMKWSLRKNSVTDVVSQQELDQVESINAMRKNIKSIQGLQHLSNLQTIYLSDNQIQDISYLTNLNKLEEIYLSGNQIKDIGHLANLNKLEKIFLQGNQLTDINLPAGLSNLKTLVLSNNQIKDICNLEKSKKLENVYLQGNQLTDISIAGLSNLNILDLSNNQIKGINQLANLNKLNELYLEGNQLTDISVLAGLSNLKTLDLNNNRIKDIRTLSTLVNLENLLMNNNQLININHLSSLLKLKLLSFNGNRVTDISSVAKLTNLTELDCSENQVDNINSLAKLTNLTGLTLEGNKVKDLSPLAQLTNLTGLNFRQNQINDISILEKLPNLDSLAFDKNKVSDVSILAKLPKLTYLIFNDNQVTNIDSLAKLPHLVGVDFSGNKVSNIKALTNLTKLRFLNANGNCIQDIQALRGLTQLEELKLARNRIMDISPLIWLNNIDELDLSNQAFINRPIDFQVNVTIPNIVKDITGTLIAPNSSSDKVTYNPPNLTWNLPTYKKEVCYTFNQSVMLGQATSQFSGQVIQPFNKLDVVKSNKAITAYGRVKPGKTSTVWTQPCRTKDTKQVGMVSAYTGKNLRILREAQTTSGIYYQFSVGGKTIGWVEAQALGIFYQSSMEKKATGARYTVRGKEGQHFYKLPVIDAAIDGGTLAKWKGKRLIIQREVTIGKEKWLLLQGVGWVKATNLTTVLYNKPMTGYAKVKLAKGKVVWSNPYNITGYKVVASLSRYTGKNLRILREAQTSNGLYYQVRVGKKTIGWVEAKNVAVFYKPIMEKKYKGTRFVKVRKKNQAYYSMPVADAAISRGKLQKFGRKRVTIDRKATIQGQQWYRIKGAGWTKAVNLSTRR

SEQ ID NO: 11043 - protein, 1338 aa, Kluyveromyces lactis
MSFLKKKSSTAGHSRSGSASSILNKHVDPANISEFYPSSLDHKVTSGLKNDYSFDSSSKGSRKSSGGSTNSLTSERLLFNWDVTDPSQWTMPRIIQWFRANDFNDQWITFFKRNSISGNKFLKLLAYDNFAPYEKSLQQSKSSSYERFQYLLKKTLEENVVKGNNRNGNRIINNSRSSSESAKVSQRLSTSFSTHIRSTSESALLNIENITKDSSSSEPTTSKKQEASNYSLPLRQAKTNSASALYRRSLISLRNASSTKDNASKNDIKITIPPRPLSTTENTNKSPTTPSSVSPSHTAYTGIFRRQHKTSSSESSLFTSIFGHGVVEEPEETPKPRPVENRRIPAASTVNASTSKQSINVDDKARLWDKIKRKGQLPAEPSSQPAARIIIEEVKESPKAEPPEIVIPEEIYPKRPSDSRELFIMLTKDNSTFSPFNVQPHLGTDVSELKKAVALALGLTHSNFSIHLTDFGAEFGSQIPDGLLADFQKTSFQNIPNKLYIQDLEKKANLNPRPRTETLASQHSTAASTKSKTSVKSNASAASNGEGSSSDLTSIDDQGSSHRRAYPQTPSHYYDNSTSAETDYWSFKDSVPETISDAPHITLPKSRPSLKLNSSVLNTHASEKSTFRIIRQTSDTDIDFNKRRESPYVRVAELAPKRKAPKPPVNGNPVTSGSLPSAAAKNVSESPLESPPKLDRNGKTIYQKNKPRPPPPLTTERSSRRSVSSLSGQDLNEVKESPVQSFTPASTQVMVPQPYKGALETLKPRKSSADLSIRPRMSLRQFSRSNSSLNRKVLSTSRQTLNRTNSKPLVTSSTAADIFDENDISFADAPELSDSDDYSASSDEIIWSRDRKSISNDVPEFSFNTEDTIDLVGTDTTQVSVGATEGSDTPKKMALRPSPDVVYQNLEKFFPDADLDNPILEGLTPPPSPNADSSPPSPRGFEKSLKTKSEQQPAFLSSRGESSQFLTPVKSLKPPKRTKTIRIIAQEASEARKNEVSQKLQRKNTKMWGTKVVEITDKRTISINKSRNSRGEYKEFAWIKGEIIGKGSFGAVYLALNVTTGEMLAVKQVTVPEFSSQDESAISMVEALKSEVSTLKDLNHVNIVQYLGFEEKNGIYSLFLEYVAGGSVGSLIRMYGRFDDQLIRHLTKQVLEGLAYLHSKGILHRDMKADNLLLDNDGVCKISDFGISRKSNNIYSNSDMTMRGTVFWMAPEMVDTAHGYSAKVDIWSLGCVVLEMFAGKRPWSNFEVVAAMFQIGKSKTAPPIPDDTKDLVSPAGQSFLDQCFEIDPEMRPTADSLVGHPFCKTSSSFDFPKTKLAQFIKSNDKLNSSRLRISSQEL

SEQ ID NO: 11044 - protein, 356 aa, Nicotiana plumbaginifolia
MSLLSDLINLNLSDSTEKIIAEYIWIGGSGMDLRSKARTLSGPVTDPAKLPKWNYDGSSTGQAPGEDSEVILYPQAIFKDPFRRGNNILVMCDAYTPAGEPIPTNKRHAAAKIFSNPDVVAEEPWYGIEQEYTLLQRDINWPLGWPIGGFPGPQGPYYCGTGADKAFGRDIVDSHYKAYLYAGINISGINGEVMPGQWEFQVGPSVGISAGDEVWVARYILERIAEIAGVVVSFDPKPIPGDWNGAGAHTNYSTKSMREDGGYEVILKAIEKLGLKHKEHIAAYGEGNERRLTGKHETANISTFKWGVANRGASVRVGRDTEKAGKGYFEDRRPASNMDPYVVTAMIADTTIIGKS

SEQ ID NO: 11045 - protein, 379 aa, Triticum aestivum
MARPRLRLLLVAAAVLLLLHPALSSAAEGLEDPLIEQVVGGDAENELELNAEAHFASFVRRFGKSYRDADEHAHRLSVFRDNLRRARRHQRLDPSAVHGITKFSDLTPDEFRERFLGLRKSRRSFLKGISGSAHDAPALPTDGLPTEFDWREHGAVGPVKDQGSCGSCWSFSTSGALEGANYLATGKLEVLSEQQLVDCDHECDPSEPRACDAGCNGGLMTTAFSYLAKAGGLETEKDYPYTGRNSACKFDKSKIAAQVKNFSTVAIDEDQIAANLVKHGPLAIGINAVFMQTYIGGVSCPYICGRHLDHGVLLVGYGSAGYAPLRFKEKPYWIIKNSWGENWGESGYYKICRGPHVKNKCGVDSMVSTVTAIHTSKKE

SEQ ID NO: 11046 - protein, 198 aa, Oryza punctata
GQTPVFPRIFGHEAGGIVESVGEGVTDLAPGDHVLPVFTGECKECPHCKSAESNMCDLLRINTDRGVMIGDGKSRFSINGKPIYHFVGTSTFSEYTVMHVGCVAKINPAAPLDKVCVLSCGISTGLGATINVAKPPKGSTVAIFGLGAVGLAAAEGARIAGASRIIGIDLNANRFEEARKFGCTEFVNPKDHDKPVQQ

SEQ ID NO: 11047 - protein, 182 aa, Clostridium acetobutylicum
MYFDEYQCPFLDNYDYEHRENEDLYRQAPRRAVATIVGGPLAPNIRGTVTFTSVPNGTEVSVVLNGLPPYRPAMGGRPQVGPHGFHIHQNGNCTPGTAAQPFPGTGEHWNPTNQPHGNHAGDFPVVFSNNGYARMTFFTNKFRVPQVIGKSVVLHESPDDYRTQPAGASGRKVACGVIRAVR

SEQ ID NO: 11048 - protein, 350 aa, Rhizobium sp. NGR234
MRILVTGGAGFIGSALVRYLVSINAEVLNVDKLTYAGNLASLKPVEGLRNYRFLRADICDRVAINEAFETFQPDYVIHLAAESHVDRSITGADDFVQTNVNGTFTMLETARQYWSNLSQNRKAFFKMLHVSTDEVYGSLGDRGQFEEVSPYDPSSPYSASKAASDHFATAWQRTYGLPVVISNCSNNYGPFHFPEKLIPLMILNALDRKPLPVYGTGSNIRDWLYVDDHARALWLIVREGRPGEKYNVGGRNELRNIDVVNRICLLLDELSPNASHYGDLITFVKDRPGHDARYAIDATKLETELGWKAQENFDTGIRKTVEWYLENGWWWQPLRDKVYSGERLGLLEKA

SEQ ID NO: 11049 - protein, 153 aa, Medicago sativa
TTRKITLKSSDGETFEVDEAVALESQTIKHMIEDDCADSGIPLPNVTSKILAKVIEYCKKHVDAAAAEDKPNEDELKSWDSEFVKVDQATLFDLILAANYLNIKSLLDLTCQTVADMIKGKTPEEIRKTFNIKNDFSPEEEEEVRRENQWAFE

SEQ ID NO: 11050 - protein, 273 aa, Lycopersicon esculentum
MGRSPCCEKAHTNKGAWTKEEDERLISYIRAHGEGCWRSLPKAAGLLRCGKSCRLRWINYLRPDLKRGNFTEEEDELIIKLHSLLGNKWSLIAGRLPGRTDNEIKNYWNTHIRRKLLSRGIDPTTHRSINDPTTIPKVTTITFAAAHENIKDIDQQDEMINIKAEFVETSKESDNNEIIQEKSSSCLPDLNLELRISPPHHQQLDHHRHHQRSSSLCFTCSLGIQNSKDCSCGSESNGNGWSNNMVSMNIMAGYDFLGLKTNGLLDYRTLETK

SEQ ID NO: 11051 - protein, 218 aa, Oryza sativa
  unsure (1)..(218): unsure at all Xaa locations
MSQGQPRRPPPDGSGARPVMYGDVFDVSGELAGQPVAPRDAAKLQSAEEAVLGEAQKGGPAAAMQSAAAINARAGHVGRAQVTGAIADEGVAVAVAETELPGRRVVTESVAGQVVARLATPPXXATRRQSRPPRCSPRGAPSPSPEASPPRRRLRRTTTPRPRHATRTGSSSGTSSRGRGASCRRTRRRRGRTRRGCRRPRCGTGRTWRRRRAAWRTR

SEQ ID NO: 11052 - protein, 211 aa, Solanum tuberosum
LGLRYSPFSHRVEWALKIKGVKYEFIEEDLQNKSPLLLQSNPIHKKIPVLIHNGKCICESMVILEYIDEAFEGPSILPKDPYDRALARFWAKYVEDKGAAVWKSFFSKGEEQEKAKEEAYEMLKILDNEFKDKKCFVGDKFGFADIVANGAALYLGILEEVSGVVLVTSEKFPNFCAWRDEYCTQNEEYFPSRDELLIRYRAYIQPVDASK

SEQ ID NO: 11053 - protein, 246 aa, Thermoplasma acidophilum
MIRLNLSVKNLKEITDLLSTIVSEAKFRVDENGMSVTAVDPAHVAMIRLEVPKEAFVEFHTDGQEEIALDIDRLKSVIRLASSSENVGITKDGEKLKFELGTINKSISLLDPSTIVTPKIPNITSEYYAVLKKSDFERGLRAAEDISDSIRFTLSQDGFKAYSHSESEESEMILPKDLITDMSCNTTIKSSYPLEYLLKFIKAISSTDSLKLSFRDDYPLSVEFYLDQNPGAKIKGLFLLAPRMEQ

SEQ ID NO: 11054 - protein, 252 aa, Oryza sativa
ARTHQRNRRQRRRLRPGRVGNSEPGASDRSFRPPRPRRPGHVTTTRCNKTLLLRVLARVRGDPSGREKIGLGLSGFGVLFSFLGIIMLFDKGFLAIGNILFVSGVSLTIGPKSTVQFFTKPKNHKGSIAFGIGFFLVLIGWPFFGMLAEAYGFVKLFRGFWPTAAVYLQKSPTFGWIFHHPLVTSDNRILTSVESRMYQFQKDLSSYVFRLLNAKPIFLDQFLGHTVLKNDSLGHTNLLLITPISTIVGKEE

SEQ ID NO: 11055 - protein, 512 aa, Ralstonia solanacearum
MSEHTTASAGTPGLRRTLRARHLTMIAIGGSIGTGLFVASGASVSQAGPGGALAAYVLIGTMVYFLMTSLGELAAYMPVPGSFATYGARYVDEGFGFALGWNYWYNWAVTIAVELAAAQLVMHYWFPEVPGVLWSAGFLAVMFLLNAISVRGFGEAEYWFALIKVVTVLCFIAIGLAMIFGIIKGAPASGLHNLTLGEAPFVGGLPAMIGVAMIAGFSFQGTELIGVAAGESADPARTIPRAVRQVFWRILLFYVLAIFIIGALVPYTDPNLLSTEVANIGVSPFTLVFRHAGLAFAAGLMNAVILTAVLSAGNSGMYASTRMLYNLATEGRAPRLFARLSKNGVPRNALLATTAVGALCFLSSLYGDKTVYLWLLNTSGMTGFVAWLGIAISHYRFRKGLVLQGHDPALLPYRSPFFPYGPLFAFGLCLVITLGQNYQAFASGRVDWAEVTATYIGIPIFFAVWLGYRLVRGGGIIRYQDMRFPRPPVTRDPPGEAPAAPGLPAAATSPQR

SEQ ID NO: 11056 - protein, 421 aa, Shigella flexneri 2a str. 301
MSNNEFHQRRLSATPRGVGVMCNFFAQSAENATLKDVEGNEYIDFAAGIAVLNTGHRHPDLVAAVEQQLQQFTHTAYQIVPYESYVTLAEKINTLAPVSGQAKTAFFTTGAEAVENAVKIARAHTGRPSVIAFSGGFHGRTYMTMALTGKVAPYKIGFGPFPGSVYHVPYPSDLHGISTQDSLDAIERLFKSDIEAKQVAAIIFEPVQGECGFNVAPKELVAAIRRLCDEHGIVMIADEVQSGFARTGKLFAMDHYADKPDLMTMAKSLAGGMPLSGVVGNANIMDAPAPGGLGGTYAGNPLAVAAAHAVLNIIDKESLCERANQLGQRLKNTLIDAKESVPAIAAVRGLGSMIAAEFNDPQTGEPSAAIAQKIQQRALAQGLLLLTCGAYGNVIRFLYPLTIPDAQFDAAMKILQDALSD

SEQ ID NO: 11057 - protein, 235 aa, Lycopersicon esculentum
MSTLDVARAELALAVLYLNKAEARDKICRAIQYGAKFLSDGQPGTAQNVDKSTSLARKLFRLFKFINDLHALISPNAPGTPLPLILLGKSKNALLSTYLFLDQFVWLGRSGIYKNKEQTELIGRISFFSWMGSSICTALVEIGELGRLSSSMKKLEKELKNTDKYMNEQYRSKLQKSNERSLALIKAGTDIVVAVGLLQLAPKKVTPRVTGAFGFVSSLISCYQLLPSSPKDKAS

SEQ ID NO: 11058 - protein, 225 aa, Zea mays
  unsure (1)..(225): unsure at all Xaa locations
SIVRFTYLFISFYYACAIFVVPECSIIIRCPKITSKIYTNFTSSQKKKKKGPPRDLVGFSSPTGFVFRFWXVGEREEMAASDVEYRCFVGGLAWATDDHSLNNAFSTYGEVLESKIILDRETQRSRGFGFVTFSTEDAMRSAIEGMNGKELDGRNITVNEAQSPRXGRGGGGGGYGGGRRDGGGYGGGGGGYGXGRGGYGGGGGGYGGRKPAAAATANNDGNWRN

SEQ ID NO: 11059 - protein, 305 aa, Zea mays
MLCRLLCLCLCPDPQVDLRDRHALVDIFSSHRFEAVIHFAGLKAVGESVHKPLLYYDNNLVGTITLLEVMAANGCKKLVFSSSATVYGWPKEVPCTEEFPLCATNPYGRTKLVIEDICRDVHRSDPDWKIILLRYFNPVGAHPSGYIGEDPCGVPNSVMRPLQLRAGVRLPHLTVYGTDYSTKDGTGVRDYIHVVDLADGHIAALRKLYEDSDKIGCEVYNLGTGKGTSVLEMVAAFEKASGKKIPLVFAGRRPGDAEIVYAATAKAEKELKWKAKYGIEEMCRDLWNWASKNPYGYAGSRDNSK

SEQ ID NO: 11060 - protein, 250 aa, Sphingomonas paucimobilis
MSNRMAGKVALVTGAASGLGAAQARLFAKEGAKVVVADLNVEMGNKVVAEIQESGGEALFVRLDITDAASWAGAVEAAVGAFGKLTTLSNTAGIIHGAMIQDETLEGWSKMIAVNQTALFLGLKIVAPEIAKSGNGAILNISSLVSVICEPGLISYAATKSAVRAMTKVAALEYVGQGVRVNTIVPGGVKTPIQANVTPEQVEWYKAQIPMGDLGEPNDIAYGALYLLSDEAKYVTGTELFIDGGWSSAA

SEQ ID NO: 11061 - protein, 454 aa, Moraxella catarrhalis
MSVHTPVIPPQNATNDYYLTRQNEMESNVRSYPRKLPLAIAKAQGCWVTDVEGNEYLDCLAGAGTLALGHNHPATINAIKDVLDSGLPLHTLDITTPIKDAFTEKLLSFFPKDFVLQFCGPTGADGTEAAIKLAKTYTGRDNVIAFSGGYHGMTHGSLAMTGNLSAKEKVGNLMAGVQFMPYPHEYRCPLGLGGEAGVDALTYYFENFIEDVESGVVKPAAVILEAIQGEGGVVPAPKKWLQKIREVTTKHDIVLILDEVQAGFARSGKMFAFEHAEIIPDVVVMSKAVGGGLPLAVLAINKKFDAWSPAGHTGTFRGNQLAMAAGYNVLTQITENNLADNARIQGEFLRGELRKAAEQYPCIGHVRGRGLMTGVEIVDERQPADHMGSYPADGELAAAIQKACFDNKLLLERGGRGGTVVRLLCPITITQEECIEVITRFKKAVGEAVKAVRG

SEQ ID NO: 11062 - protein, 516 aa, Gentiana triflora
MSPIYTTLTLHLATALFLFFHVQKLVHYLHGKATGHRCRRLPPGPTGWPILGALPLLGNMPHVTFANMAKKYGSVMYLKVGSHGLAIASTPDAAKAFLKTLDLNFSNRPPNAGATHLAYNAQDMVFAHYGPKWKLLRKLSNLHMLGGKALENWADVRKTELGYMLKAMFESSQNNEPVMISEMLTYAMANMLSQVILSRRVFNKKGAKSNEFKDMVVELMTSAGYFNIGDFIPSIGWMDLQGIEGGMKRLHKKFDVLLTRLLDDHKRTSQERKQKPDFLDFVIANGDNSDGERLNTDNIKALLLNLFTAGTDTSSSIIEWALAELLKNRTLLTRAQDEMDRVIGRDRRLLESDIPNLPYLQAICKETFRKHPSTPLNLPRNCIRGHVDVNGYYIPKGTRLNVNIWAIGRDPSVWGDNPNEFDPERFLYGRNAKIDPRGNHFELIPFGAGRRICAGTRMGILLVEYILGTLVHSFDWKLGFSEDELNMDETFGLALQKAVPLAAMVIPRLPLHVYAP

SEQ ID NO: 11063 - protein, 304 aa, Zea mays
LTSSFSSLSGSLPEERHYCHTTTPPMLNMMTDLSCGPSSKAAKGGQPAATTGSGGDRQGRGKIEIKRIENTTNRQVTFCKRRNGLLKKAYELSVLCDAEVALVVFSSRGRLYEYANNSVKSTIERYKKANSDTSNSGTVAEVNAQHYQQESSKLRQAIDSLQNANRTIVGDSIHTMGLRELKQMEGKLEKAINKIRARKNELLYAEVEYMQKREMDLQTDNMYLRSKIAENNETGQPPMNMIGLPSTSEYDHMAPFVDSRNFLQVNMQQQPQHYSHLSAATNDPPTRMMKLRIFGQQSMHASTQ

SEQ ID NO: 11064 - protein, 321 aa, Streptococcus mutans UA159
MKTRITELLDIEYPIFQGGMAWVADGDLAGAVSKAGGLGIIGGGNAPKEVVKANIDKIKAVTNKPFGVNIMLLSPFADDIVDLVIEEGVKVVTTGAGNPGKYIERFHEAGITVIPVVPSVALARRMEKLGADAVIAEGMEAGGHIGKLTTMTLVRQVVDAVNIPVIGAGGVADGRGAAAVFMLGAEAIQVGTRFAVAKESNAHANFKKKILKAKDIDTVISASIVGHPVRAIKNKLSSAYATAEKEFLRGEKSQEDIEVLGAGALRNAVVDGDVDNGSVMAGQIAGFVTKEETCEEILKDLYYGAAKVIKAEAARWADVEK

SEQ ID NO: 11065 - protein, 479 aa, Bacillus cereus ATCC 14579
MLEKKVGIYFAIKRENNVKKRMGYAMNTKKFAKVNEQIPGPKAASLLERRQNIVPKGVSNGIPTFVRSANGALVTDVDGNQYIDFAGAIGTINVGHCHPTVKEALHKQVDQYIHTGFNVMMYEPYIELAEKLAALAPGSFDKQVLFLNSGAEAVENAVKIARKYTKRPGIIAFSKGFHGRTLMTMTMTSKVKPYKFGFGPFAPEVYKAPFPYEYRRPEGLTEEQYDDFIIEEFKNFFISEVAPETIAAVVMEPVQGEGGFIVPSKKFVQEVRRICSENGILFVADEIQTGFSRTGKYFAIDHYDVVPDLITVSKSLGAGVPISGVIGRKEIMNESAPGELGGTYAGSPLGCAAALAVLDVIENEKLNDRAIELGKVVMNRFEEMKNKYHCIGDVRGLGAMCAFEVVQDRKTKAPDKTLTANLCAEANKRGLLLLSAGTYGNVIRVLMPLVITDEQLEEGLTIIEESLQACYEQTNIARV

SEQ ID NO: 11066 - protein, 764 aa, Bacteroides fragilis
MKHFVRRMQAFAASLVVVAAGLQAQKAPRDMDRFIDQLMKKMTLEEKIGQLNLPVTGEITTGQAKSSDVAKRIRNGEVGGLFNLKGVERIREVQRQAVEESRLGIPLLFGMDVIHGYETIFPIPLGLSCTWDMKAIEESARIAAVEASADGISWTFSPMVDVSRDPRWGRVSEGNGEDPFLGAAIARAMIRGYQGKDMSRNDEIMACVKHFALYGASEAGRDYNTVDMSRQRMFNEYMLPYQAAVEAGVGSVMASFNEVDGVPATGSKWLMTDVLRKQWGFDGFVVTDYTGINEMIDHGMGDQQTVAALALNAGVDMDMVSDAFSGTLKKSVEEGKVSAAAIDAACRRILEAKYKLGLFDNPYKYCDVNRPKKQIFTKEHRAIARKTASESFVLLKNEGVLPLSKKGTIAVVGPLANTRSNMPGTWSVAAVLDNAPSLVEGLREVVGDRAKVVTAKGSNLIGDADYEKRATMFGRELHRDNRTDRELLDEALKVAAGADVIVAALGESSEMSGESSSRTNLEMPDVQRALLQELLKTGKPVVLVLFTGRPLVLTWEEEHVPAILNVWFGGSEAAYAISDVLFGDVNPSGKLTATFPQNVGQIPLFYNHKNTGRPLQEGRWFEKFRSNYLDVSNEPLYPFGYGLSYTTFAYSDIHLSSTEMSADGELTATVTVTNTGSRDGAEVVQLYIRDLVGSVTRPVKELKGFEKIFLKAGESRKVSFSITPELLKFYNYDLQFVCEPGDFDVMIGGNSRDVKKARFLLKGE

SEQ ID NO: 11067 - protein, 131 aa, Zea mays
  unsure (1)..(131): unsure at all Xaa locations
DLXEFRLPXGHRPTXNLDTDGLQQASVYTQLTASNVGFRLLXREGWKTGKGLGKNEQGILEPIRADMRDAKLGVGKQEEDDFFTSEENVQRKKLNIELEETEEHIKKREVCNLTPGASFSTFMQFFPWADA

SEQ ID NO: 11068 - protein, 370 aa, Methanothermobacter thermautotrophicus str. Delta H
MKCYLTGCIAGPLAFSEDLELIDYEPFPVDEIPGRLAESQMGGVSPEERIMLERLTPEYDEVVVEASPSPEYAGFRNLRFEVPSRAGIHLRENLEDILAEILDMPAGDFIHDALMSVARERLRESLRETDRFIIQSINALDELDEETGKLIERLREWYSLHFPELDGIKSHEQYVELIAEYGDRDQILKNFRMDVDESLGSDITSEDLHILRGLAESIRGLQRLREETERYIDIKMEKLAPNLRALAGSNVGARLIAHAGGLRELAMLPSSTIQVLGAEKALFRHLKSGAKPPKHGVIFQHPSIRSSPWWIRGKVARLLAGKIAIAVRKDVFSREFDPGIVESFNERFEAIKSNNPKPPARKKGFRKKRK

SEQ ID NO: 11069 - protein, 94 aa, Triticum aestivum
  unsure (1)..(94): unsure at all Xaa locations
MTESLVRNKPGMASIKEMPVVQDGPPPGGFAPVRFARRIPTSGPSATAIFLTTFGAFAYGMYQVGQGNKXRRALKEEKIAARSAVLPMLQAEEG

SEQ ID NO: 11070 - protein, 457 aa, Escherichia coli O157:H7 EDL933
MMEGQQHGEQLKRGLKNRHIQLIALGGAIGTGLFLGSASVIQSAGPGIILGYAIAGFIAFLIMRQLGEMVVEEPVAGSFSHFAYKYWGSFAGFASGWNYWVLYVLVAMAELTAVGKYIQFWYPEIPTWVSAAVFFVVINAINLTNVTVFGEMEFWFAIIKVIAVVAMIIFGGWLLFSGNGGPQASVSNLWDQGGFLPHGFTGLVMMMAIIMFSFGGLELVGITAAEADNPEQSIPKATNQVIYRILIFYIGSLAVLLSLMPWTRVTADTSPFVLIFHELGDTFVANALNIVVLTAALSVYNSCVYCNSRMLFGLAQQGNAPKALASVDKRGVPVNTILVSALVTALCVLINYLAPESAFGLLMALVVSALVINWAMISLAHMKFRRAKQEQGVVTRFPALLYPLGNWICLLFMAVVLVIMLMTPGMAISVYLIPVWLVVLGIGYLFKEKTAKAVKAH

SEQ ID NO: 11071 - protein, 487 aa, Halobacterium sp. NRC-1
MSSSQTRSPDAELGLLDATMIGMGAMIGAGIFVLTGLAAEIAGPAAILVFALNGVVTAFTGLSYAELAASIPKSGGGYAFVREIFGDFSSFIMGWMLWFAYMIAGALYALGFAPNFLELLHVYGLVAPPDQVGAIAVPLLDASVPAAFVLAFIAVLGLVALNAVSTAASGSAETIFTIIKVSILVVFVAFGATSPLFSGAEFQPLFGVGGGPAAILPAMGLTFIAFEGYDLITTVTEEVKNPRENIPKAIFVSLIATVIVYLAVVTVAVGTLGADGLAAAGEAGIAEAATSFMPTGLPIIQNGGALIVFGAVFSTLTALNAVVIASSRVAFSMGREGQLLPSFGQIHHRYGTPFVAIIASAVVMLASVALPTQSAGNMSSLFFLLSFIIVNVAVIRLRRERPDMNRPYEMPFYPAPPLIGIALNLVLSVVLVDYLVRTDPLALALSAAWIVLGTAAYYAHASRQSAAGDDEDTTTISADAEHTPHDH

SEQ ID NO: 11072 - protein, 357 aa, Rhodobacter sphaeroides
MADNHLKIAVIAGDGIGKEVVPEGLRVLEAVAGRHRIDLRFEEFDFASCDYYARHGQMMPEDWQERIGGHDALFFGAVGWPATVPDHVSLWGSLIQFRRQFDQYVNLRPARLMPGVPSPLAGRGPGDIDMWIVRENTEGEYSAIGGRMYPGTEREIVLQETVMSRHGIDRVLRYAFELANRRERRRLTSATKSNGISITMPYWDERVEAMAQDYPDVAWDKYHIDILAAHFVLNPDRFDVVVASNLFGDILSDLGPACTGTIGIAPSGNINPERAFPSLFEPVHGSAPDIAGQGIANPVGQIWAGAMMLDHLGHGEAAAEIMAAIERVLADPRLRTRDLAGAADTVTCGKAIVEALG

SEQ ID NO: 11073 - protein, 1140 aa, Adiantum capillus-veneris
MSSKTMTYSSSAAEPRSSSSSVVGSKHNRRVVVAQTTADAKLHAVFEQAQSEGDTGGSSFDYMRSIEDARGSVLSERVPAQAVTAYLQRMQRGGLIQPFGCMLALEEGSFRVIAYSENAAEMLDLMPQSVPSVGVQVLVLGIGTDARTLFTYASAAALEKASGAVDVSMLNPITVHCRSSSKPFNAIVHRIDVGLVIDFEPVRPADVAVWAAAGALQSHKLAAKAISRLQALPVGDIDLLCDSVVEEVRELTGYDRVMAYKFHEDEHGEVLAEIRRSDLEPYLGLHYPATDIPQASRFLFMKNRVRMICDCRALPVRVIQDKELRQPLSLAGSTLRAPHGCHSQYMANMGSIASLVMAVVVNDNDEDVSNRSQQPKMRRLWGLVVCHHTTPRAVPFALRSACEFLMQVFGLQLNMELELAAQMREKHILRTQTLLCDMLLRDAPIGIVSESPNIMDLVKCDGAALYYGKNFWLLGTTPIEAQIKDLAEWLLDVHRDSTGLSTDSLADAGYPGAAALGDAVCGMAAAKITTRDFLFWFRSHTAKEIKWGGAKHDPEDRDDGRKMHPRSSFKAFLEVVKRRSLPWEDMEMDAIHSLQLILRGSFQDIDDSDTKTMIHARLNDLKLHGMDELSTVANEMVRLIETATAPIFAVDAGGFINGWNAKVAELTGLTVEEAMSRSLVRDVVVNASMETAERVLDLALQGQEEQNVEIKLKTYGDQAIKGPVILIVNACSSRDFTDNVVGVCFVGQDVTGQKVVMDKFTRIQGDYKTIVQNPNPLIPPIFGADEFGYCSEWNPAMEKFSGWKREDVIGKMLIGEVFGSDLACCKLRGQDSMTKFMIILNAAMGGRDSDRFPFGFFDRYGKYAEALLIANKRTDSDGAITGVFCFLHTASPELQQALQVQKRSARTALDRLKEVAYMKQEIRNPLYGIVFTRKLLDNTNLTDEQKQIMETSSLCEKQLQNILDEDNFEKLDQGNVDLDTLEFTMGTVMDAVISQGMIRSREKGLQLIRETHVEIKNTRLFGDQYRLQQVLADFLTTAIRFTSSSDGWVGIKVVPTIKNMKDGLHIVHFEFRVSHPGSGIPEDLVQQMYDRSQEITQEGMGLSVSRKLVKLMNGDVKYTREAGVCYFLVTVELPLVQEDD

SEQ ID NO: 11074 - protein, 876 aa, Saccharomycopsis fibuligera
MLMIVQLLVFALGLAVAVPIQNYTQSPSQRDESSQWVSPHYYPTPQGGRLQDVWQEAYARAKAIVGQMTIVEKVNLTTGTGWQLDPCVGNTGSVPRFGIPNLCLQDGPLGVRFADFVTGYPSGLATGATFNKDLFLQRGQALGHEFNSKGVHIALGPAVGPLGVKARGGRNFEAFGSDPYLQGTAAAATIKGLQENNVMACVKHFIGNEQEKYRQPDDINPATNQTTKEAISANIPDRAMHALYLWPFADSVRAGVGSVMCSYNRVNNTYACENSYMMNHLLKEELGFQGFVVSDWGAQLSGVYSAISGLDMSMPGEVYGGWNTGTSFWGQNLTKAIYNETVPIERLDDMATRILAALYATNSFPTEDHLPNFSSWTTKEYGNKYYADNTTEIVKVNYNVDPSNDFTEDTALKVAEESIVLLKNENNTLPISPEKAKRLLLSGIAAGPDPIGYQCEDQSCTNGALFQGWGSGSVGSPKYQVTPFEEISYLARKNKMQFDYIRESYDLAQVTKVASDAHLSIVVVSAASGEGYITVDGNQGDRKNLTLWNNGDKLIETVAENCANTVVVVTSTGQINFEGFADHPNVTAIVWAGPLGDRSGTAIANILFGKANPSGHLPFTIAKTDDDYIPIETYSPSSGEPEDNHLVENDLLVDYRYFEEKNIEPRYAFGYGLSYNEYEVSNAKVSAAKKVDEELPEPATYLSEFSYQNAKDSKNPSDAFAPADLNRVNEYLYPYLDSNVTLKDGNYEYPDGYSTEQRTTPNQPGGGLGGNDALWEVAYNSTDKFVPQGNSTDKFVPQLYLKHPEDGKFETPIQLRGFEKVELSPGEKKTVDLRLLRRDLSVWDTTRQSWIVESGTYEALIGVAVNDIKTSVLFTI

SEQ ID NO: 11075 - protein, 212 aa, Claviceps purpurea
GGKCNRGMSVPDSVSLLLGRPLQEEEYFHAATLGWMTELLQAFFLVSDDIMDGSITRRRKPCWHRQDGVGMIAINDAFLIESAIYALLKKYFRSHPAYVDMLELFHEATFQAELGQLCDLITGPVDKVDLGNFSMDKYRFIVIYKTAYYSFYLPVALALHQLNLATPRNLKVAEDILIPLGEYFQVQDDYLDNFGRPEHIGKIGTDIQDNKC

SEQ ID NO: 11076 - protein, 249 aa, Ralstonia solanacearum
MTQALNNQVALVTGASRGIGRAIALELARQGATVVGTATSEAGAQAISAYFAEAGVKGAGVVLNVNDAARCEAVIDEAIKTHGGLNILVNNAGITQDNLAMRMKDDEWMAVIDTNLSAVFRLSRAVLRPMMKARGGRIINITSVVGSAGNPGQANYAAAKAGVEGMARAMAKEIGSRNITVNSVAPGFIDTDMTKVLSDEQHTALKAQIPLGRLGMPEDIANAVAFLASPAAGYITGATLHVNGGMYMG

SEQ ID NO: 11077 - protein, 242 aa, Streptococcus agalactiae 2603V/R
MELLKTPIFGICFSLILYTIGEHLFKKSKGFFLLQPLFFAMVSGIVILWLMSKGLGTDVKTFYTQAYKPGGDLIFWFLNPATIAFAVPLYKKNDVVKKYWVEILSSLVIGMIVSLILIVAISKMVGLSQVGIASMLPQAATTAIALPITAAIGGNTAVTAMACILNAVIIYALGKKLVSFFHLNDSKIGAGLGLGTSGHTVGAAFALELGELQGAMAAIAVVVIGLVVDLVIPIFSHLIGLL

SEQ ID NO: 11078 - protein, 305 aa, Miscanthus transmorrisonensis
IESVGEGVTDVAPGDHVLPVFTGECKECPHCKSAESNMCDLLRINTDRGVMIGDGKSRFSINGKPIYHFVGTSTFSEYTVMHVGCVARINPQAPLDKVCVLSCGISTGLGASINVAKPPKGSTVAIFGLGAVGLAAAEGARIAGASRIIGVDLNPSRFEEARKFGCTEFVNPKDHKKPVQEVLAEMTNGGVDRSVECTGNINAMIQAFECVHDGWGVAVLVGAPHKDAEFKTHPMNFLNERTLKGTFFGNFKPRTDLPNVVELYMKKELEVEKFITHSVPFAEINKAFDLMAKGEGIRCIIRMEN

SEQ ID NO: 11079 - protein, 624 aa, Gossypium hirsutum
MATTGVQNQEKVPMNLKQQLALAVRNIQWSYGIFWSISAKQPGVLEWGDGYYNGDIKTRKTVQSFEPKADDQLGLQRSEQLRELFESLSAGETSPHTKRPSVALSPEDLTATEWYYLVCMSFVFNIDQGLPGRTLSIGQPIWLCNAQYADSKVFSRSLVAKSASIQTVVCFPYAGGVIELGVTDLVSKDPGLIHRVKSLLLDAPETITGNINDVACPGLGPNEIESELSPFLGCEQLERGSPNEISDGFEPNQPAEDPFVNGGASQVQSWQFMDDHHSLNTSDCISQTFSDHEDVVPLCQGENDNDNDFRDVEECDRINRAAFDPISDDMHYRTVVSVLLKSSHQFILGPHFGNSNKESGFISWKMNSSVKYRKAKVEIPQKLLKKMLFEVPRMHDKGLLKSPQGGDGVGDAVWRPEADELCKSHVLSERRRREKINERLMILKSLVPTNSKADKVSILDDTIEYLQDLERRVEELECCRELTESETKTKQKHHRDRAERTSSNKVTNGNKSASSNKRKAYDIEETKQDIDHVASKDGSTENLTVSTNNKDLTIEFKCRWRDGILFEIMDALSVLDLDCHSVQSSTIEGILSVTIKSKYKGSSVAKPGTIKQALLQKVQSLTFV

SEQ ID NO: 11080 - protein, 458 aa, Neurospora crassa
MVQISEVKGNSRDNRTAAHTHIKGLGLNSQGIAEKQASGFVGQTTAREACGVVVDLIKAHKMAGRGVLLAGGPGTGKTALALAISQELGTKIPFCPITGSEIYSTEVKKTEVLMENFRRAIGLKVRETKEVYEGEVTELTPEEAENPLGGYGKTITTLLIGLKSAKGQKKLRLDPSIYEAIQKERVTVGDVIYIEANTGACKRVGRSDAYATEFDLEAEEYVPIPKGEVHKKKEIVQDVSLHDLDVANARPQGGQDIMSMMGQLMKPKMTEITDKLRSEINKVVSKYIDQGVAELVPGVLFIDEAHMLDVECFTYLNKALESPISPIVVLASNRGMTGIRGAEDLVAAHGIPPDFLSRLLIIPTTAYDPEEIKRIVKIRSTTEGVKITEAAIDKIAEHGVRISLRYCLQLLTPASILAKVNGRNEIDVQDVAECEDLFLDARRSAALLSSEQGQEFIC

SEQ ID NO: 11081 - protein, 92 aa, Glycine max
  unsure (1)..(92): unsure at all Xaa locations
MLCERITKRGDAEDDKXIKKLDAQLTPYKEQINKTRPGPAQEAVKXLQLMIVLKQKLLHEGQLDMLYNHDXSILDQVQXAADGIKDAQHTTL

SEQ ID NO: 11082 - protein, 181 aa, Pseudomonas fluorescens PfO-1
MSLRKYQNHTPRLGQGAFVDGSAVVIGDVEIGEDSSVWPLTVIRGDMHRIRIGARTSVQDGCVLHITHAGPFNPDGFPLLIGDDVTIAHKVMLHGCTVGSRVLIGMGSIVMDGAVVEDDVIIGAGSLVPPGKHLESGFLYVGSPVKQIRQLTDKENAFFTYSAANYVKLKDLHLAEGYDQL

SEQ ID NO: 11083 - protein, 135 aa, Glycine max
  unsure (1)..(135): unsure at all Xaa locations
RGRVGDHRLSRAKFFFIALECSFSWYVVPGYLFTTLTNISWVXWIFSKSVTAQQIGSGMRGLGVGALTLDWAAGASFLVSPLISXPFFAFVNVFGGYALIVYVVIPLLYIFFLVYNDFQFLFFFLLLIFYLLISI

SEQ ID NO: 11084 - protein, 269 aa, Triticum aestivum
MEEEGAKKAVLFRLFGVEVRGAEEEDDAEPMELKKSTSMPNLACASTDPILLPGEASNDKGYASDDGELASTPQLKRRRRKAQERKKGIPWTEEEHRKFLEGLKQLGKGDWRGISKNFVTTRTATQVASHAQKYFLRQTNPGKKKRRASLFDVGIPAGHSYDDQLPSPQSVGTKLAPAEKILHTDRGDVPLPSYPGGIRGNNNNNNMQMQADELTDHVKKRSKFHSGTSLAAMAASGLELAMSSSASSILELSIAPPRCYGAVDAIKVL

SEQ ID NO: 11085 - protein, 151 aa, Pneumocystis carinii
MSNEQNLTEEQISEFKEAFSLFDKDGDGSITTKELGIVMRSLGQNPTEAELQDMVNEVDADGNGTIDFPEFLAMMARKMKDVDSEEEIREAFKVFDKDGNGIISAAELRHVMTNLGEKLTDEEVDEMIREADVDGDGVIDYSEFVKMMLSK

SEQ ID NO: 11086 - protein, 184 aa, Yersinia pestis CO92
MSHPIYAISVQTIDHQLVKLAKYKGSVLLVVNVASQCGLTQQYEGLESLYKTYQKQGFEVLGFPSNEFAGQEPGSDEEIHAFCRGTFGVDFPMFSKIEVNGPHRHPLYQHLVTAKPVAVKPEGSEFYQRLASKGREPKQPGDILWNFEKFLISRDGTVLARFAPDMAPEAPILINAINQALASH

SEQ ID NO: 11087 - protein, 300 aa, Chloroflexus aurantiacus
MMTAEPVQALIVHGGAWAIPDDQVTAHIAGCIAARTAGWQVLQNGGSALDAVEAAVRVMEDDPIFDAGTGSVLTSAGTVELDAALMDGRTLRYGAVAGLQRIRNPITLARHVLNGPATMLVGPGAEAFAATVGIPFCDNAELVVERERQLWLAWKAQGSPPPPPASGHDTVGAIALDQSGQLVAANSTGGTPFKLPGRVGDTPLIGCGLYATADGAAVCTGWGESITRVALARRVVELLEDGMHPQEAAERGIKLLSELVPDGRGGVIVLTPRGEVGLAWNTPRMAYAYITSRGAAQAGV

SEQ ID NO: 11088 - protein, 151 aa, Zea mays; identical to SEQ ID NO: 743

SEQ ID NO: 11089 - protein, 357 aa, Solanum tuberosum
MALQIAKRLLRCRADSVASSVRFFDRTFTSESNSNLIRATLFPGDGIGPEIAESVRQIFKVAEVPIEWEEHYVGTEVDPRTNSFLTWESLESVRRNKVGLKGPMATPIGKGHRSLNLTLRKELNLYANVRPCYSLPGYKTRYDDVNLITIRENTEGEYSGLEHQVVRGVVESLKIITRQASLRVAEYAFHYAKTHGRERVSAIHKANIMQKTDGLFLKCCREVAEKYPEIKYEEVVIDNCMMMLVKNPALFDVLVMPNLYGDIISDLCAGLIGGLGLTPSCNIGEGGIALAEAVHGSAPDIAGKNLANPTALLLSSVSMLRHLELHDKADRIQDAILKTIAGGKVPNWRPWRHCYNN

SEQ ID NO: 11090 - protein, 118 aa, Glycine max
VTAAFAFSGTELVGLAAAETKNPLKSLPGAVRQVFWRITLFYVLGLLFVGLLIDSTDPRLLGSGALIDVTASPFVLVGEYAGLKGFDSFMNVVILVSVVSIGVSGVYGGSRTLTALAE

SEQ ID NO: 11091 - protein, 169 aa, Zea mays
SEVGWLLLPHRFVFRFWFVGEREEMAASDVEYRCFVGGLAWATDDHSLNNAFSTYGEVLESKIILDRETQRSRGFGFVTFSTEDAMRSAIEGMNGKELDGRNITVNEAQSRGGRGGGGGGYGGGRRDGGGYGGGGGGYGGGRGGYGGGGGYGGANRGGGYGNNDGNWRN

SEQ ID NO: 11092 - protein, 208 aa, Glycine max
  unsure (1)..(208): unsure at all Xaa locations
MSSDPEKRVTSEVVEDDELSPIEEVRLTGTNTDHPTRPVWTLRMWFLRLLSCSLLSFLNQXFAYRTVPLIITQITVHVATLPIGHFMAAFLPTTTFSIPGFGSKSFSFNPGPFNMKEHVLITIFANAGSAFGSGSPYAVGIVNIIKAFYGRSISFAASWLLIITTQVLGYGWAGLLRKYVVEPAHMWWPSTLVQVSLFRALHEKDDHR

SEQ ID NO: 11093 - protein, 221 aa, Prochlorococcus marinus subsp. pastoris str. CCMP1378
MYMNYLISSFYLGYYFKVEFQVSIFVGNLPFRAEREDILELFTPYGEVMNCSLPLERDTGRKRGFAFVEMADEALETSAIDGLQGTELMGRPLRINKAEPRGGGGGPRRGGGGGRGGYGGGGNGGGYGGGGNGGGYGGGGNGGGYGGGGNGGGYGGGGRGGYGGGGNYSEPASSYVNKSSGAEGWEDRSYGNSSENSDFENGRSRRKRSVASNSEISQEGN

SEQ ID NO: 11094 - protein, 140 aa, Triticum aestivum
MVSFEMNDLKKIGLGLTGFGVFFSFLGIVFFFDKGLIAMGNILFLSGLGMTIGLKSTMQFFTKPKNYKGTISFGAGFFLVLIGWPFFGMLLEAYGFIVLFSGFWPTLAVFLQRIPILGWIFQQPFVTSFLDRYRGKRVPV

SEQ ID NO: 11095 - protein, 493 aa, Oryza sativa
  unsure (1)..(493): unsure at all Xaa locations
MAMPTTIVQQRRGDYNDDSRGVKEANKGGGMHPRLAHHLQPRIPTDLRRRPPHAGDPPRRTMPPTSVSPPRTAPGPANPSPAHPSRVRVIHPGGGKPXXGPVVYWMLRDQRLADNWALLHAAGLAAASASPLAVAFALFPRPFLLSARRRQLGFLLRGLRRLAADAAARHLPFFLFTGSGPAEIPALVRRLGASTLVADFSPLRPVREALDAVVGDLRREAPGVAVHQVDAHNVVPVWTASAKMEYSAKTFRGKVSKVMDEYLVEFPELPAVVPWDREQPEGVDWDALIARVCSEAENVPEIDWCEPGEEAAIEALLGSKDGFLTKRIKSYETDRNDPTKPRALSGLSPYLHFGHISAQRCALEAKKCRHLSPKSVDAFLEELVVRRELADNFCYYQPQYDSLSGAWEWARKTLMDHAADKREHIYTREQLENAKTHDPLWNASQLEMVHHGKMHGFMRMYWAKKILEWTSGPEEALSTAIYLNDKYQIKKYI

SEQ ID NO: 11096 - protein, 326 aa, Pirellula sp.
MSIQWFPGHMHKARLEIQAALPKVDVVMEIIDARIPYSSENPMLADIRGDKACLKVLTKSDLADPHRTEEWLDALNSSSSTRARSVTTDDVPTIRRLKSALIGMCPHRKGRSINAMVMGIPNVGKSTIINFLAGRKVAKTGNTPAVTQHQQRVDIGDGVILWDTPGMLWPKVHNVSSGYRLALIGSIKDTAMDYTDVGFFAARYFMEQYPDRLASRFDLESVADTEMAVIEDIGRRRGCLGRNNRVDLERASRILIQEYRTGGLGRLTLETPATMQRERILTQKAMVEAEEAARLKDEKRKKRFKNKQKAQRKSREMDASRRDRRQ

SEQ ID NO: 11097 - protein, 363 aa, Maytenus fournieri
QSQKLAVRAISQLQSLPGGDVKLLCETVVESVKDLTGYDRVMVYKFHDDEHGEVVAERKRPDLEPYIGLHYPATDIPQASRFLFKQNRVRMIVDCHALPVRVIQDDGLMQPLCLVGSTLRAPHGCHAQYMENMGSIASLAMAVIINGNDEEVIGGRNPTRLWGLVVCHHTSARCIPFPLRYACEFLMQAFGLQLNMELQLAAQLLEKHVLKTQTLLCDMLLRDSPTGIVTQSPSIMDLVKCDGAALYYQGSYYPLGVTPTEAQIKDIVEWLLAFHGDSTGLSTDSLADAGYPGAALLGDAVCGMAVAYITNRDFLFWFRSHTAKEIKWGGAKHHPEDKDDGQRMHPRSSFKAFLEVVKSRSMP

SEQ ID NO: 11098 - protein, 142 aa, Triticum aestivum; identical to SEQ ID NO: 7930

SEQ ID NO: 11099 - protein, 261 aa, Glycine max
MRGSHHHHHHGSGKSYPTVSADYQKAVEKAKKKLRGFIAEKRCAPLMLRLAWHSAGTFDKGTKTGGPFGTIKHPAELAHSANNGLDIAVRLLEPLKAEFPILSYADFYQLAGVVAVEVTGGPEVPFHPGREDKPEPPPEGRLPDATKGSDHLRDVFGKAMGLTDQDIVALSGGHTIGAAHKERSGFEGPWTSNPLIFDNSYFTELLSGEKEGLLQLPSDKALLSDPVFRPLVDKYAADEDAFFADYAEAHQKLSELGFADA

SEQ ID NO: 11100 - protein, 113 aa, Zea mays subsp. parviglumis
MGRRACCAKEGVKRGAWTSKEDDALAAYVKAHGEGKWREVPQKAGLRRCGKSCRLRWLNYLRPNIRRGNISYDEEDLIIRLHRLLGNRWSLIAGRLPGRTDNEIKNYWNSTLV

SEQ ID NO: 11101 - protein, 187 aa, Triticum aestivum
CRLREEPAFSWIRKLPADIRTAIHHSKILFCNGYAFDEFFPDVIASSIDCAIDSGTAVFFDPGPRGKSLLDGTLDEQRALEHALRFSDVLLLTSDEAESLTTIRNPVQAGQELLKKGVRTKQVVIKMGSKGSIMITKSTVSCAPAFKINVVDTVGCGDSFTAAIAFGFLHDLPAVNTLTLANAVGAA

SEQ ID NO: 11102 - protein, 363 aa, Simicratea welwitschii
QSQKLAVRAISQLQSLPGGDIKLLCDTAVESVRDLTGYDRVMVYRFHEDEHGEVVAESKRPDLEPYIGLHYPATDIPQASRFLFKQNRVRIIVDCHASPVSVIQDDGLMQPLCLVGSTLRAPHGCHAQYMENMGSIASLAMAVIINGNDEEGMGGRNPTRLWGLVVCHHTSSRCIPFPLRYACEFLMQAFGLQLNMELQLAAQLLEKHVLKTQTLLCDMLLRESPTGIVTQSPSIMDLVKCDGAALYYQANYYPLGVTPTEAQIRDIVEWLLACHGDSTGLSTDSLADAGYPGATLLGDAVCGMAVAYITNRDFLFWFRSHTAKEIKWGGAKHHPEDKDDGQRMHPRSSFKAFLEVVKSRSLP

SEQ ID NO: 11103 - protein, 252 aa, Oryza sativa; identical to SEQ ID NO: 10413

SEQ ID NO: 11104 - protein, 277 aa, Nicotiana tabacum
MAFFNRVGSILKQSVSKHSNLELSASNASLFQAIRSMSSSKLFVGGLSYGTDESSLKEAFSQYGDVIEARVIMDRDTGRSRGFGFISFPSSEEAASALQAMDGQDLHGRRIRVNYATEKRRAGFGGGYGGGGGGFNYGGEGGNSAGAGGYPTNNYGGGFSGGNTSAGGYGSYGGGSNYGNDNSSPAEGGVGYGSANYGNTPNSNYSGPGNSFSGGYDGGNNGNGFGESPGASFNGGQEQVSVDQGTQSINEDIGQETSEGNYRDDDDEPKDFANSRG

SEQ ID NO: 11105 - protein, 310 aa, Oryza sativa
  unsure (1)..(310): unsure at all Xaa locations
XWMAKNSSHRPNCHTMRTSSISPPLMHNSMASVSASAGAGSPTVPPSATPTVKRKRGRPRKYGPDGGSVSGADMVGGGSGMDDSAQKKRRGRPPGTGKKQQLSSPVKLSGGNAFSGSAGTSFTPHIITASPSEDVAGKIVAFANHSSRAVCVLSATGSVSRVVLRHPADGANPAIYEGLYEILSMSGCYNLMNXXGQSDGLSVTLCSPERHIIGGVLGGALVAASTVQVVLGSFVQGGSKPKSKKAGKQQQQQAAAAAFSSDSLTGGGQDASPSSGHNQNLTPPPPVTTTGGWRIFDTRSSNIDINSSRG

SEQ ID NO: 11106 - protein, 281 aa, Euglena gracilis
MDLDYEGQAPTTSLLLLFPPHLVPEYIGTISNNLRSAEVNHRPSKTFLEEVQVDITRLMRAILVDWMNEVTEEFRLKMETLCLAVNYVDRYLSRVPVPRHQLQLVGVASLLIASKMEEIMHPQIDEFVYITDSTYNREQVLRMELSILNALRYDMTVVTPRDFVGIYLKVAQASPEVCMLADYLLELILQEYAFLHWEPSMIAASAVVLALFGFRLPCWSDDLRRITQYQPNELNACLKEMHRVFQNAPHNNLQAVREKYSHGRFMHISMVAQLPPSPPVF

SEQ ID NO: 11107 - protein, 751 aa, Geobacillus stearothermophilus
MENQNRQNAAQCPFHGSVTNQSSNRTTNKDWWPNQLNLSILHQHDRKTNPHDEEFNYAEEFQKLDYWALKEDLRKLMTESQDWWPADYGHYGPLFIRMAWHSAGTYRIGDGRGGASTGTQRFAPLNSWPDNANLDKARRLLWPIKKKYGNKISWADLFILAGNVAIESMGGKTIGFGGGRVDVWHPEEDVYWGSEKEWLASERYSGDRELENPLAAVQMGLIYVNPEGPDGKPDPKAAARDIRETFRRMGMNDEETVALIAGGHTFGKAHGAGPATHVGPEPEAAPIEAQGLGWISSYGKGKGSDTITSGIEGAWTPTPTQWDTSYFDMLFGYDWWLTKSPAGAWQWMAVDPDEKDLAPDAEDPSKKVPTMMMTTDLALRFDPEYEKIARRFHQNPEEFAEAFARAWFKLTHRDMGPKTRYLGPEVPKEDFIWQDPIPEVDYELTEAEIEEIKAKILNSGLTVSELVKTAWASASTFRNSDKRGGANGARIRLAPQKDWEVNEPERLAKVLSVYEDIQRELPKKVSIADLIVLGGSAAVEKAARDAGFDVKVPFFPGRGDATQEQTDVESFAVLEPFADGFRNYQKQEYSVPPEELLVDKAQLLGLTAPEMTVLVGGLRVLGANYRDLPHGVFTDRIGVLTNDFFVNLLDMNYEWVPTDSGIYEIRDRKTGEVRWTATRVDLIFGSNSILRSYAEFYAQDDNQEKFVRDFINAWVKVMNADRFDLVKKARESVTALQDDCLGRSIIEIMLQ

SEQ ID NO: 11108 - protein, 306 aa, Hordeum vulgare subsp. spontaneum
MATAGKVIKCKAAVAWEAGKPLSMEEVEVAPPQAMEVRDKILYTALCHTDVYFWEANGQTPVFPRILGHEAGGIVESVGEGVTELVPGDHVLPVFTGECKECAHCMSEESNLCDLLRINVDRGVMIDDGQSRFTIDGKPIFHFLGTSTFSEYTVIHVGCVTKIDPEAPLDKVCLLSCGISTGLGATLNVTKPKKGMTVAIFGLGAVGLAAMEGARMSGASRIIGVDLNPAKHEQAKKFGCTDFVNPKDHTKPVQEVIVEMTDGGVNRAVECTGNADAMISAFECVHDGWGVAHKEAVFKTHPMNFL

SEQ ID NO: 11109 - protein, 823 aa, Phanerochaete chrysosporium
MGLTLVVLLHLALGLLTGVQAQSGLYQQCGGIGWTGATTCVSGATCTVLNPYYSQCLPGAATTSVSSSHSSSSSVSSHSSSESSSSISSTSTSPPAPSQTVANVSPEWAAAYVKAQAAVAKLSVTDMVNLATGVQWQKGPCVGNTPAISSIPGFTGLCLQDSPVGVRYADGTSVFPPEINVAATWNRTLMRQRGAAMGAEFKGKGVHVALGPMMNLMRVPAAGRNWEGGGGDPFLSGEVAFETISGIQSSGAQACAKHFINNEQEHFRDSSSSNVDDRTEHELYGHPFLRSVQANVASVMCSYNQINGTFSCENEKTLSGLLKGEYGFQGYVMSDWWATHSGAPAVNAGLDMTMPGDETLSSGTTYFGQNLVNAVNSGQVSQARVKDMATRILAAWYLLGQDQNFPAVNFNSWNSGQGQHVNVSGNHASLIRTIGAASQILLKNANGALPLKKPKTIGIIGNGAGSNPNGPNAFSDRAGDVGVLALGWGSGTANFPYLVAPVDAITARASQDGTTVSSSLSDTDLTGAANTATGKDVAMVFITADSGEGYLTVEGNAGDRNDLQAWHGGDALVQQVASHNKNTIVVINSVGPINMEAWVNHPNVTAIVWSGLPGQEAGNAVTDVLFGAVNPGGKLPFTIGKSISDYSAQIITTGSGIVPIPYNEGLFIDYRHFDQAGIAPRFEFGFGLSYTTFDYSNLVITGSTAGGTRQPPGPGSSLDPWLHDSVVTVSFTLTNNGTVDGTEVPQLYLSPPASAKSAPQNLKGFDSVFLPAGASTTVSFELSRYSFSVWDVVSQSWQIPAGVTGISVGASSRDLRLKGSITN

SEQ ID NO: 11110 - protein, 197 aa, Oryza eichingeri
GQTPVFPRILGHEAGGIVESVGEGVTELAPGDHVLPVFTGECKECAHCKSEESNMCDLLRINVDRGVMIGDGQSRFTINGKPIFHFVGTSTFSEYTVIHVGCLAKINPEAPLDKVCILSCGISTGLGATLNVAKPKKGQTVAIFGLGAVGLAAMEGARLSGASRIIGVDLNPAKFEQAKKFGCTDFVNPKDHSKPVH

SEQ ID NO: 11111 - protein, 227 aa, Nostoc punctiforme
MSSVQLYFAKASTFSQRTRVVLLEKGIDFSSTEIDLQNKPDGYTQISRYGKVPAIKHGDIEIYESAIINEYLDEVFPEPPLLPRDPGAKAIARIWIDYANTRFVPAFNKFLRGKDAQEQGQGQREFLEALLYIEQEGLGKLSGNGPYWLGEQLSLVDISFYPWFERLPLLEHFRNFTLPTETPRLQKWWNTVRDRESIRAVENPTSFYLERFAKILGAPTPVASAQK

SEQ ID NO: 11112 - protein, 616 aa, Sulfolobus solfataricus
MTSVSNSDKLLRKELGLLDLTFLSLSAMIGSGWLLASLSVASIAGPSGILSWIIAGIMVMFIGLAYAELGSSIPKTGGIVRYPVYSHGSYTGFVIAFLYLLSAISTPSIEALATIEYLTNVNPTLSKLLTNSTVVNGTPVTILTLPGLLFSILLLFIYFLVNYYGIKILGKTNSAITVWKLIIPVVTFMLLFFAFKSSNFTNYGGLFPKSVASNYGGPVGMLYAIPSAGIIYSYLGFRQPIEYSGEAKNPERNVWRAIILSIVIAILIYTFLQIAFIGAINWVSAGVTPGNWSALLNSKWANSPFYSELEAEGLAIAGAWGYVLLIDAVLSPSGTGLVYTGTSARTLYGLSAEEYFPLIFKKLNSYRIPIWSLIVSLIASIIFLLPFPSWYLLVGFNSSATVLTYIMGGIGLQTLRKTAPDLKRGIKIPFASIIAPVATIVSLLIVYWSGFTTLFYIISALFIGIPIFWINYAVKILGLKKWIGISLGISQLVVNIILTIIGYYSLVLNNDNPILYFALFILMALTPLVVAYLTVNTNEKVHLKSGFWLMGLIITIYIISYPSEFGPSSNSAPIRFPYDIAIISIIGIIFHYLAVLSGFRTREIEEIIEDQKERRD

SEQ ID NO: 11113 - protein, 361 aa, Antirrhinum majus
MLFSHSQQTHLQNPIFDALLCNEEHFDEDLDLGSGLKDPGFINQIHHNQKKEEPFTTFLFEHDLLWEDDELVNLLSKEKEQEQQAHLGYDDVMDSDGFLKRVRNEGIKWMLKVIGHYGFNAMTAVLAVNYYDRFITNVGFQKDKPWMSQLAAVACLSVKVEETQVPLLLDFQVEESKYVFEAKTIQRMELLVLTTLKWKMNPVTPISFFDHIVRRFELMNNVQCEFMKRCESVILSIITDYRFVRYLPSVVAAATMIYVIKELYPCDALEYQNEFVTVLRTSKEKTDDCHMLITEVINNQSYILCHKRKYGSIPSSPNGVIDAYFSSDGSNDSWSAVSSVSSSPEPVFKRIRAIGGANPPH

SEQ ID NO: 11114 - protein, 297 aa, Nicotiana tabacum
MVEKPKSGGVWPTVKPFVNGGASGMLATCVIQPIDMIKVRIQLGQGSAVDVTKTMLKNEGFGAFYKGLSAGLLRQATYTTARLGSFRILTNKAIEANEGKPLPLYQKALCGLTAGAIGACFGSPADLALIRMQADATLPLAQRRHYTNAFHALSRIVADEGVLALWKGAGPTVVRAMALNMGMLASYDQSVEFCRDNLGMSEAATVVGASSVSGFFAAACSLPFDYVKTQIQKMQPDAEGKLPYSGSFDCAMKTLKAGGPFKFYTGFPVYCVRIAPHVMMTWIFLNQIQKAEKKLGL

SEQ ID NO: 11115 - protein, 349 aa, Aspergillus flavus
MSIPEMQWAQVAEQKGGPLIYKQIPVPKPGPDEILVKVRYSGVCHTDLHALKGDWPLPVKMPLVGGHEGAGVVVARGDLVTEFEIGDHAGLKWLNGSCLACEFCKQADEPLCPNASLSGYTVDGTFQQYAIGKATHASKLPKNVPLDAVAPVLCAGITVYKGLKESGVRPGQTVAIVGAGGGLGSLALQYAKAMGIRVVAIDGGEEKQAMCEQLGAEAYVDFTKTQDLVADVKAATPEGLGAHAVILLAVAEKPFQQAAEYVSRGTVVAIGLPAGAFLRAPVFNTVVRMINIKGSYVGNRQDGVEAVDFFARGLIKAPFKTAPLQDLPKIFELMEQGKIAGRYVLEIPE

SEQ ID NO: 11116 - protein, 388 aa, Microbulbifer degradans 2-40
MSVSALMNTYGERKTTLTKGDGPYLWDSEGRRYLDALSGIAVCGLGYNYPSVTQAISEQAKTLIHCSNLFLIEPQQELGKLLVQASGMDKVFFSNSGAEANEAAIKLARKYAQDKGITAPHIITCDKSFHGRTMATLSATGNPKVKAGFFPMVEGFSHVPYNDIEAIKQAATENTIAIMVEPIQGEGGVNVPADDYLTNLRALCDENGWLLILDEIQTGNGRTGAYFAYQHTNIHPDVVTTAKGLGNGVPIGACLAKGKAAEVFQPGNHGSTFGGNPLACSAAVATFKALVNDGIMKSGAATGNSMIAKFKERFANNPKVVEVKGQGMMMGIQLSQDCPTLVERAKEKNLLLNVTAGNTIRLLPPLILTEEQAQTVVDTVVQLVEEIE

SEQ ID NO: 11117 - protein, 462 aa, Bacillus subtilis subsp. subtilis str. 168
MANKELKRGLGARHIQMIALGGTIGVGLFMGSASTISWTGPSVLLAYAICGIFIFFIMRAMGEMLYVEPSTGSFATFGHQYIHPMAGYITAWSNWFQWIIVGMSEIIAVGSYTKYWFPDLPAWIPGIVAMVILGAANLISVKSFGEFEFWFAMIKIVTIILMIIAGIGIIFFGFGNGGDAIGLSNLWSHGGFFAGGFSGFFFALSLVIAAYQGVELIGITAGEAKDPQNTLRNAIQSIIWRILIFYIGAIFVIVTVYPWDELNSLGSPFVSTFSKIGITAAAGIINFVVITAAMSGCNSGIFSAGRMLYTLGVNGQAPKFFKKISRNGVPLYGTIAVLIGLAVGVVLNYIAPPKIFVYVYSASVLPGMIPWFIILISHIGFRKAKGAALDKHPFKMPFAPFTNYLTIAFLLMVLVGMWFNDDTRISLIVGVIFLALVVISYYVFGIGKRTQANLTKSEQAAE

SEQ ID NO: 11118 - protein, 298 aa, Lactococcus lactis subsp. lactis
MIFIPLVVLAIILLILIFSLSTIVFVVKQQTVAIVERFGKYQFTANPGFHLKLPWGIDRIAARVQLRLLQTEMTVETKTADNVFVTMNIATQYRVNEQSIKDAYYKLMNPGEQIKAYIEDALRSAVPKLTLDDVFEKKDEIALEVQKTVAEEMQTYGYIIVKTLITKVEPDAEVKQSMNEINAAQRKQDASQMLANANKIQVVTAAEAEAEKDRLHGVGIAEQRKAIVDGLAQQITEIKKLGVALDEEQIMAILLTNQYLDTLNQFAAGGNSTIFLPSGAEGAESLRTQILSAIKAGK

SEQ ID NO: 11119 - protein, 196 aa, Escherichia coli
MSYYAFEGLIPVVHPTAFVHPSAVLIGDVIVGAGVYIGPLASLRGDYGRLIVQAGANIQDGCIMHGYCDTDTIVGENGHIGHGAILHGCLIGRDALVGMNSVIMDGAVIGEESIVAAMSFVKAGFRGEKRQLLMGTPARAVRNVSDDELHWKRLNTKEYQDLVGRCHVSLHETQPLRQMEENRPRLQGTTDVTPKR

SEQ ID NO: 11120 - protein, 260 aa, Rhodospirillum rubrum
MRKDGWADPSIRRSPMFDLTGKKALVTGASGGLGASIAKALADRGASVALSGTREAALNETAVFLGKDVPILPCDLSDTAAVERLIPAAEAALSGLDILVNNAGLTRDMLSMRMKDEEWDQVIAVNLSAAFRLSRSAVKGMMKRRWGRIVNITSIVGVTGNPGQANYAASKAGLIGLSKSMAAEVAARHITVNCVAPGFIATAMTDKLNEKQKEAILPHIPAGRMGAPEDVAAAVVYLASEEAAYVTGQTLHVNGGMAMI

SEQ ID NO: 11121 - protein, 126 aa, Citrus sinensis
VKAVAVMTGTNGRKGTVSFSVEGSGPTTVKGSLSGLPPGDHALIIHTYGNISNDWISTGPPFKPAGADGFLENITVTSEGIATFEIYKTIPLSGTNSVIGRGLVVHSSPSPDPGDGVAWGTIGLSY

SEQ ID NO: 11122 - protein, 228 aa, Pseudomonas putida KT2440
MSLEPMPLFWLALTLLAYLGSRWLYRRSQRYLLSPLILVPVLLLAVAVPLHTAYAEYARNTHWLMGVLGPVTVAFAVPIWQQRAMLARHWPALMVGMVAGSSASIASSWGLAHLLALDSATSLSLVPRSITTPFAMPLAHDLGGVPELTAVFVMFTGVLGAMFGGVLLRWLPLRTPLARGALFGVGAHGAGVSRAQEVGREEGSVAGLVMVLTGLLNLFAAPLLALLL

SEQ ID NO: 11123 - protein, 394 aa, Staphylococcus aureus subsp. aureus Mu50
MNSIIELTDYYSSNNYAPLKLVISKGKGVKVWDTDGKQYIDCISGFSVANQGHCHPTIVKAMTEQASKLSIISRVLYSDNLGKWEEKICHLAKKDKVLSLNSGTEAVEAAIKIARKWGSEVKGITDGQVEIIAMNNNFHGRTLGSLSLSNHDAYKAGFHPLLQGTTTVDFGDIEQLTQAISPNTAAIILEPIQGEGGVNIPPKGYIQAVRQLCDKHQILMIADEIQVGLGRTGKWFAMEWEQVVPDIYILGKALGGGLYPVSAVLANNDVMRVLTPGTHGSTFGGNPLAIAISTAALDVLKDEQLVERSERLGSFLLKALLQLKHPSIKEIRGRGLFIGIELNTDAAPFVDQLIQRGILCKDTHRTIIRLSPPLVIDKEEIHQIVAAFQDVFKN

SEQ ID NO: 11124 - protein, 505 aa, Limnanthes douglasii
MSETKPEKPLIATVKNTLPDLKLSINLKHVKLGYHYLITHGMYLCLPPLALVLFAQISTLSLKDFNDIWEQLQFNLISVVVSSTLLVSLLILYFMTRPRPVYLMDFACYKPDETRKSTREHFMKCGESLGSFTEDNIDFQRKLVARSGLGDATYLPEAIGTIPAHPSMKAARREAELVMFGAIDQLLEKTKVNPKDIGILVVNCSLFSPTPSLSSMIVNHYKLRGNIISYNLGGMGCSAGLISVDLAKRLLETNPNTYALVMSTENITLNWYMGNDRSKLVSNCLFRMGGAAVLLSNKTSDKKRSKYQLVTTVRSHKGADDNCYGCIFQEEDSNGKIGVSLSKNLMAVAGDALKTNITTLGPLVLPMSEQLLFFATLVARKVFKKKIKPYIPDFKLAFDHFCIHAGGRAVLDELEKNLQLSSWHLEPSRMTLYRFGNTSSSSLWYELAYSEAKGRIRKGERVWQIGFGSGFKCNSAVWKALKSVDPKKEKNPWMDEIHQFPVAVV

SEQ ID NO: 11125 - protein, 856 aa, Brassica rapa
QRCVRNIYYQSYTFSFVLAFVVLILFHPAISMHFNTLLSTESLTISGNRTLVSPGHVFELGFFKNTLNSRWYLGIWYKNLSDRTYVWVANRDSSLSNAIGTLKLCRSNVVLRGRSNKFVWSTNLTRGNERSPVVAELLANRFLVSWRSSDNDASGFLWQSFDFPTDTLLPEMKLGYYLKTGLNRFLTSWRNFNDPSSGEFSYKLETRRLPEFYLLKNGSPGQRSGPWNGGQFSGIPEDQTLSYMVYNFTENSEEVAYTFRMTDNSIYSRIQLSPEGLLERLTWTPTSGTWNLFWSAPVDIQCDVYMTCGPYAYCDVNTSPVCNCIQGFMPFDMQQWALRDGTGGCIRRTRLSCSSDGFTRMKNMKLPDTKMAIVDRSIDVKECEKRCLSDCNCTAFANADIRNGGTGCVTWTGELEDIRNYIGNGQDLYVRLAAADLVKKRKANGKIISLIVGVSVLLLLIMFCLWKRKKNRAKAMASSIDNQQRNQNVLMNGMTQSNKRQLSRENKTEEFELPLIELEAVVKATENFSNCNELGQGGFGIVYKGMLDGQEVAVKRLSKTSLQGIDEFMNEVRLIARLQHINLVRILGCCIEADEKILIYEYLENSSLDYFLFGKKRSSNLNWKDRFAITNGVARGLLYLHQDSRFRIIHRDLKPGNILLDKYMIPKISDFGMARIFIRAETQVRTDNAVGTYGYMSPDYAMYGVISEKTDVFSFGVIVLEIVSGKRNRGFYQVNPENNLPSYVWTHWAEGRALEIVDPVILDSLSSLPSTFKPKEVLKCIQIGLLCIQERAEHRPTMSSVVWMLGSEATEIPQPKPPVYCLIASYYANNPSSSRQFDDDESWTVDKYTWSVIDAR

SEQ ID NO: 11126 - protein, 487 aa, Zea mays
MATAAVESKRGSARGRKALVAVLDNEANISAGKAAQAADLSSCSAQKKAKRAPSRSSKAKAAAASAVVVVDDIAELQGMLERLRLEKEKAEEMVRERDEVIRKKEEEIETRDKEQERLQAELRKAQRAKEFKPTVSFPLVKSLLEKEQEADDKGKKKKGKGGHERKKPCPAYVLWLKDQWTEVKKENPEADFKEVSNTLGAKWKALGAEEKQPYEDRYRQEKEAYLQVVGQEKREAEAMKLLEEQQMQWTAKELLDQYLKFRQEAEEGDCKKGRKKKSKKDKDPSKPKQPMSAYFVYSQERRATLVAEKKNVPEIGKITGEEWKNMTEGQRAPYVEVARKQKEEYHKQMEVYKQKKAEEAASLEKEEQEHKKIMKHEALQLLKKKEKADNIIKKTKEKRQKKKQENADPNRPKRPASSFLLFSKEERKQLIEERPGINNSTLNALITVKWKELSGEERQAWNAKAAPAMAAYKKEMEEYTKAQSSSA

SEQ ID NO: 11127 - protein, 152 aa, Triticum aestivum; identical to SEQ ID NO: 6819

SEQ ID NO: 11128 - protein, 394 aa, Zea mays
  unsure (1)..(394): unsure at all Xaa locations
MPPKAKKDAAPSERPILGRFSSHLKIGIVGLPNVGKSTFFNIVTKLAIPAENFPFCTIEPNEARVNVPDERFDWLCKLYKPKSEVPAYLEVTDIAGLIRGAHAGDGLGNAFLSHIRAVDGIFHVLRAFEDAEITHVDDTVDPVRDMETISEELRLKDIEFMKKKLEDLDKSMKRSNDKQLKIEHELCERVIGHLEEGKDVXRLGDWKAADIEILNTFQLLSAKPVVYLVNMSEKDFQRKKNKFLPKIHAWVQEHGGETILPFSCAFEQKLVDMPEDEAAKYCAENQITSMIPKIIKTGFAAIHLIYFFTAGPDEVKCWQIRRQTKAPQAAGAIHTDFERGFICAEVMKFEDLKELGSESAVKAAGKYKQEGKTYVVQDGDIIFFKFNVSGGGKK

SEQ ID NO: 11129 - protein, 656 aa, Oryza sativa
  unsure (1)..(656): unsure at all Xaa locations
MEEQQVKPSDSHPPPATPVDSQDSTAPPVRTPDPVSQATSNDSATQFASTVHVAPSPAPVPNAVPIQDAAGREAQSSIFSTSGLSSWAKNLKIPQPSSGQESPTGKNTFSRLTSGLGLRLSPKGPQQDESAEGSTTPTTAQSIFGSFTIGIVDSSKDAVKAVQVKARHMVSQNIRRYQEGXGSDLDMTYITEYIIAMGFPXAGDLSSGLFGYFEGFYRNHMEEVIRFFEMHHKGKYKVYNLCSERLYDASLFEGKVACFPFDDHNCPPIQLVISFCHSAYSWLKEDIENVVVVHCKAGKARTGLMISSLLLYLKFFPTAEESIEYYNQKRCVDGKGLILPSQIRYVKYFERILTYFNGENQPPRRCMLRGFRLHRCPYWIRPSITVSNHNGVLFTTKKHPRTKELMPEDFWFSAPKKGIMVFALPGEPGLTEVAGDFKIQFHDRQGDFYCWLNTTMMENRVTLNPTDLDDFDKRKLPSPGFQVEVVLVDYDGSQPPKPKPAAASTDQKSEADSSTGTVDNASSAEVSNKESARNDKDDVFSDSEAEDGSSKGRREKVSRNVEGTTNAAKASETSSVQKEASAAASRIEKVSITSEQGSARTPDAAPLKSGVSSKSSSTTAPPPPPAAADSSMSEFKAIAADASVFSFGDEDDYESE

SEQ ID NO: 11130 - protein, 236 aa, Neurospora crassa
MVSVSKPPFNSVLRRFDIVNRGLSGYNTSNALKLLPQIFSPPGPGVPKLAYLFVLLGANDAALPQPVNNQHVPLDKYKQNLVSIITHSNITAHNPKIFLITPPPLDELKASEVEPGVRKHRVSASYSEAVRQVAAEHSVGLIDLYKAVMDYAISKTPGFDRSKGNLGDPETGERGHLKNLLPDGLHLSSEAYKLLYEAVKPHLGKEWEGTDAAQRVGYVLPDWKVAPWLEEDVLKP

SEQ ID NO: 11131 - protein, 539 aa, Schizosaccharomyces pombe
MTSNRSTRSSTKREEVSKNGVEKRELDESDVMKNGKKPVKRAKVSSLPKPVRVPGSAKRINKIPELPTERLNVYVFGSGSMNELGMGEEEMDVVYRPRLNPILSTDKVGVVDLAVGGMHSAALSHDGRVYTWGVNDDYALGRLTKDQKDENGDKVDNDLLEGTPSKVEGALSHLRVTKVICSDNLTAAITDNGCCFTWGTFRCSDGVLGYSDSQKRTAEPTQMRLPEICQLATGTDHIIALTTTGKVYTWGNGQQFQLGRRMLERRRLQGLTPQPLALKNIISVGAGSYHSFAIDNKGRVYAWGLNITRQCGIEVEDEEEGAVITKPTLVDALEGYNVKSITGGEHHTLALLEDGRVLAWGRDDRHQLGIPDNALPETVVKDEKGNNYYLSTPTIIPGLTNVIQVVCGTHHNLAVTSDGKVYSWGSAENYEVGQGDNDEDVAVPTLVRSKAIKEVAIRVAGAGGQFSIIAGIPNASEEPVANGIKSEPENEKKLKTEETSKTDDSPVTDAKPDVTSNGEPSTATSESKDSVLEPSSTTA

SEQ ID NO: 11132 - protein, 164 aa, Glycine max
MASSQEKRIMVLAMDAHEHSNYALEWTLDHFFTPFGANAPFNLVIVNAKPSPPPAVSMAGPGALGSEIFPAVQVQLKANAEQIAEKAKQFCASKSVLEVLVEVVEGDARNVLCDAVDRHRASVLVLGSHGYGAIKRAVLGSVSDHCARHAHCSVMIVKRPKFKY

SEQ ID NO: 11133 - protein, 220 aa, Brassica oleracea
GGAGGGFGGGAGGGHAGGGAGGGHGGGAGGGFGGGAGGGHGGGAGGGFGGGAGGGKGGGLGGGGGVGGGHGGGVGGGFGGGAGGGKGGGVGGGFGGGAGGGKGGGLGGGHGGGVGGGFGGGAGGGKGGGVGGGHGGGAGGGFGGGAGGGHGGGAGGGFGGGAGGGHGGGAGGGFGGGAGGGHGGGAGGGFGGGAGGGHAGGGGAGGGFGGGAGGGGGGGF

SEQ ID NO: 11134 - protein, 150 aa, Schizosaccharomyces pombe
MTTRNLTDEQIAEFREAFSLFDRDQDGNITSNELGVVMRSLGQSPTAAELQDMINEVDADGNGTIDFTEFLTMMARKMKDTDNEEEVREAFKVFDKDGNGYITVEELTHVLTSLGERLSQEEVADMIREADTDGDGVINYEEFSRVISSK

SEQ ID NO: 11135 - protein, 171 aa, Saccharomyces cerevisiae
MAEASIEKTQILQKYLELDQRGRIIAEYVWIDGTGNLRSKGRTLKKRITSIDQLPEWNFDGSSTNQAPGHDSDIYLKPVAYYPDPFRRGDNIVVLAACYNNDGTPNKFNHRHEAAKLFAAHKDEEIWFGLEQEYTLFDMYDDVYGWPKGGYPAPQGPYYCGVGAGKVYARD

SEQ ID NO: 11136 - protein, 461 aa, Salmonella enterica subsp. enterica serovar Typhi
MAEKKPELQRGLEARHIELIALGGTIGVGLFMGAASTLKWAGPSVLLAYIIAGLFVFFIMRSMGEMLFLEPVTGSFAVYAHRYMSPFFGYLTAWSYWFMWMAVGISEITAIGVYVQFWFPEMAQWIPALIAVGLVALANLAAVRLYGEIEFWFAMIKVTTIIVMIIIGLGVIFFGFGNGGQAIGFGNLTEHGGFFAGGWKGFLTALCIVVASYQGVELIGITAGEAKNPQVTLRSAVGKVLWRILIFYVGAIFVIVTIFPWNEIGSNGSPFVLTFAKIGITAAAGIINFVVLTAALSGCNSGMYSCGRMLYALAKNRQLPAAVAKVSRHGVPVAGVALSILILLVGSCLNYIIPNPQRVFVYVYSASVLPGMVPWFVILISQLRFRRAHKEAIADHPFRSIMFPWANYLTMAFLVCVLIGMYFNEDTRMSLFVGVIFLLAVTLVYKVFGLNRHGTAHKVGE

SEQ ID NO: 11137 - protein, 166 aa, Methanosarcina acetivorans C2A
MKALVFGADGFEDLELFYPYHRLKEEGITTHVASMKKGPITGKHGYEITADIAFKDVNSADYDIIVISGGKGPEKMRLDKDALEIVKNFFKKNKPVASICHGPQVLVSADVIKGRKATCWIGIRDDIIAAGAQYEDSEVVVDGNLVSSRNPGDLHAFGREMIKLLK

SEQ ID NO: 11138 - protein, 439 aa, Salmonella typhimurium LT2
MSKPKSNKMGVVQLTILTMVNMMGSGIIMLPTKLSEVGTISIISWLVTAVGSMALAWAFAKCGMFSRKSGGMGGYAEYAFGKSGNFMANYTYGVSLLIANVAIAISAVGYGTELFGAALTPLQIGLATIAVLWVCTIANFGGARITGQISSVTVWGVIIPVVGLCIIGWFWFSPSMYVASWNPHHVPFFSAVGSSIAMTLWAFLGLESACANADVVENPEKNVPIAVLGGTLGAAVIYIVSTNVIAGIVPNMDLANSTAPFGLAFAQMFTPAVGKVIMALMVMSCCGSLLGWQFTIAQVFKSSADEGYFPKVFSRVTKVDAPVQGMLIIVIIQTGLSLMTISPSLNSQFNVLVNLAVVTNIIPYILSMAALVIIQKMANVPSSKAKVANFVAFVGAMYSFYALYSSGEEAMLYGSIVTFLGWTLYGLVSPRFELKNKHG

SEQ ID NO: 11139 - protein, 363 aa, Buchnera aphidicola str. Bp (Baizongia pistaciae)
MGFKCGFVGLPNVGKSTLFNYLTKLNIPADNYPFCTIKSNVGIVPVLDNRLNKIAQVVCSNKIIPATIELVDIAGLVKGAYKGEGLGNQFLDHIRDTNVIMHIVRCFENRYVTHIYGSVDPVRDVQIINLELILSDIEVCKNRMCKLEINKLSHNKQVNKELLILKKCVYHLEKSKSLRSLNLTEEEIFVINYLRLITLKPVVYIFNISIDQSRNLYKREIFDIIKNEHNAKTVNVCLDLMQSSKNDVSAYDHLSLKYKQLFNKMLKNVIWAGFNALNLITFFTAGKKEVHAWTTTNNLFIFQSVKCIHTDLSKGFIRAQVISYDDFIKYKGEKRSKELGKIRIEGKRYVICDGDIIHVLYNV

SEQ ID NO: 11140 - protein, 555 aa, Triticum aestivum
MAAAAAEEAAPGADAIMDGFAELERQQELLASCTRLYQQLTEHFGSLERGIKSRSDSLRARRRVVELRASRRLDAPSAPASAPSTPSVKLALSRLDALAKSPRPKRDREDGDGPPSPPPPPPSDDVAEGLAALCAAMDPAGFLAFVVERRKEVDALRAELPAALQRCVDPARFAMDAVSEVFPVDRRAVRSPTDLAWACVLILEAVVPALADPDPEIGAARPMVPQAARDRARGMAAEWKEVAERKGGVEGAKPPDAHAFLQHVATFAVAEKEDKELYKRIVLSFSWRRQMPRLALTLGLEDDMEEIIEELITKGQQLDAVNFAYEAGLLEKFSPVPLLKSYLEDSKKIYCTSDNVSTSSGQSGVNANKKEQSALRAVIKCVEDHKLEAEFPLEDLRKRLEELEMAKTEKKKAASSCSSGGPASKRIKGSAGGAMSPSKSGRLSDNTGAPSSPATATSSSTATAFIGSPASHVSYGTGSPYSYDRSAGHALYCGQSPLPMREPYAYPPAVPVPNVGLGMPYQAPPMTYPIYAGYNSGLGAYGNAMAPAFHQAYYR

SEQ ID NO: 11141 - protein, 244 aa, Zea mays
AEEKGVPAFWLNAMKNHEILAEEIQERDEEALKYLKNITWYRISEPKGFKLEFQFGTNPFFKNSVLTKTYHMIDEDEPILEKAIGTEIEWYPGKCLTQKVLKKKPRKGSKNTKPITKTEDCESFFNFFSPPQVPDDDEEIDEDIAEQLQNEMEQDYDIGSTIRDKIIPHAVSWFTGEAAQDEEFEVMDGEDDDDEDNDDEDEDDEDDDDDDDYDDDDYDTKQKTKGTAGGEGQQGERPAECKQQ

SEQ ID NO: 11142 - protein, 325 aa, Triticum aestivum
  unsure (1)..(325): unsure at all Xaa locations
MGESQPLHAPTAVPHLAGAADEQAAAGVPPPLLPGKEFTRNXKGLVLVLMGVSLRLXQLIAPSLKYPGISPAKTIPIWYGLSAPPGTSCSVLPXGAIGSSLGSLPSAGTDIXEPVWGRKEXFLKFIILINSICGILAFCIAVALYYVTGKESFLVTPLSGFHGALAGFLVGLKQLLPNLELPMCFFWKIKAKWMPFFVMCFSTIMAFIVPDSINFLPTLLSGMYVSWLYLRYFQKNPLTGLKGDPSDDFSFPSLFPDAMRPVTDPVANLFDRMLCARSKPSEIALPVTDPTKASRRRERGERVLEERMAADHAADAEAPAHSAED

SEQ ID NO: 11143 - protein, 144 aa, Pseudanabaena sp. PCC 7409
IYRFSEQGDGTVISEVKQPDLEPFLGLRYPDSDIPKQAKHLYTLNWLRLIPDVNYQPTGLVSHGLPEAASPLQNASLDMSYCTLRSVSPIHIKYLQNMGVTASMSVSLIQNKKLWGLIACHHYTPKFVPYETRTICEFLGQLMS

SEQ ID NO: 11144 - protein, 171 aa, Oryza sativa
MGIPAASVAARTAVGAALAAVIAARAVRRRSLDGSGGAAGFVVMAIHLACGYRYGALVLAFFFTSSKATKIGADRKRRIEDDFKEGGQRNWKGTNGGVTLQGLLAATAGGLIIGLTFVFVGLLTVECSFDVALRQLLVIPISATAGLLGSLIDSVLGATLQFSGYCSVRKK

SEQ ID NO: 11145 - protein, 765 aa, Salmonella typhimurium
MKWLCSVGVAVSLAMQPALAENLFGNHPLTPEARDAFVTDLLKKMTVDEKIGQLRLISVGPDNPKEAIREMIKDGQVGAIFNTVTRQDIRQMQDQVMALSRLKIPLFFAYDVVHGQRTVFPISLGLASSFNLDAVRTVGRVSAYEAADDGLNMTWAPMVDVSRDPRWGRASEGFGEDTYLTSIMGETMVKAMQGKSPADRYSVMTSVKHFAAYGAVEGGKEYNTVDMSSQRLFNDYMPPYKAGLDAGSGAVMVALNSLNGTPATSDSWLLKDVLRDEWGFKGITVSDHGAIKELIKHGTAADPEDAVRVALKAGVDMSMADEYYSKYLPGLIKSGKVTMAELDDATRHVLNVKYDMGLFNDPYSHLGPKESDPVDTNAESRLHRKEAREVARESVVLLKNRLETLPLKKSGTIAVVGPLADSQRDVMGSWSAAGVANQSVTVLAGIQNAVGDGAKILYAKGANITNDKGIVDFLNLYEEAVKIDPRSPQAMIDEAVQAAKQADVVVAVVGESQGMAHEASSRTNITIPQSQRDLITALKATGKPLVLVLMNGRPLALVKEDQQADAILETWFAGTEGGNAIADVLFGDYNPSGKLPISFPRSVGQIPVYYSHLNTGRPYNPEKPNKYTSLYFDKPNGPLYPFGYGLSYTTFTVSDFTLSSPTMQRDGKVTASVKVTNTGKREGATVIQMYLQDVTASMSRPVKQLKGFEKITLKPGKRKTVSFPIDIEALKFWNQQMKYDAEPGKFNVFIGVDSARVKQGSFELL

SEQ ID NO: 11146 - protein, 267 aa, Streptomyces avermitilis MA-4680
MDIRRRNNVVVTGRPDGPVVLLAHGFGCDQNMWRLVVPALADDFRVVLFDYVGSGRSDLSAWSEQRYSSLEGYALDVLEVCEELDLRDVAFVGHSVSAMVGVLAAQKAPERFSRLVMVAPSPRYIDEDGYRGGFSAEDIDELLTSLDSNYLGWSATMAPVIMDNPDRPELGEELTASFCATDPDIARAFARTTFLSDSRQDLKSVAVPTLVLECAQDVIAPREVGAYVHAAIPGSRLVTLDATGHCPQLSAPDATAQAITAFLGATR

SEQ ID NO: 11147 - protein, 263 aa, Oryza sativa
  unsure (1)..(263): unsure at all Xaa locations
MHAHQHQHALLAALLACALAASSSTAGAQPAGQHDVSGQQVHVSTTMIVLLAAVVGVFLFIAISTIYLRHCTGYDPATEGGGVGGSRSMTNSFVSRRQRRPRGLDSSVVRMFPTMKYAEAKALRVGKVAGAALECAVCLSEFEDDEMLRFLPKCSHAFHPXDCIGQWLASHVTCPVCRRNLDPNKDTTEEVIIRDRHPAPRDAVTVGAAETSAAKLPRSHSTGHSLAVRLDGVERYTLRLPEHVHREMVAAGEQSRTXMLFFF

SEQ ID NO: 11148 - protein, 208 aa, Phanerochaete chrysosporium
GAGGETTAGTLTFVVYFLTQHPNVLQRLRQEILDVVGPSNLPTYDDIKQMKYLRAVLNETLRLYPPVPWNMRYAVKDGILPNSEPDGKPWFIPAGASVSYSVHCMHRRKDYWGPDAEEFDPDRFLDERLHKYLTPNPFIFLPFNAGPRICLGQQFAYNEMSFFLVKLLQTFEDISFERDAFEPNALPPAEWAKFPGRKGKEKFWPRHI

SEQ ID NO: 11149 - protein, 284 aa, Securigera parviflora
GQATGEDSVVILHPQAVFKDPFRRGNNILVICDSYTPSGVPIPTNKRHDDAKIFSHPDVVAEEPWYGIEQEYTLLQKDTLWPYGWPVGGYPDSQGPYYCGNGADKAFGRDIVNAHYKACLYAGINISGINAEVMPGQWEFQVGPAVGISAGDEIWVARYILERITEMAGVVLSFDPKPIKGDWNGAGAHANYSTKSMRNDGGYEVIKSAIAKLEKRHKEHIAAYGEGNERRLTGKHETADINTFLWGVANRGASVRVGRETEKAGKGYFEDRRPASNMDPYVVT

SEQ ID NO: 11150 - protein, 259 aa, Phaseolus vulgaris
EGCVEEPGHHAEKKRRLSVDQVKALEKNFEVENKLEPDRKVKLAQELGLQPRQVAVWFQNRRARWKTKQLERDYGVLKANYDSLKLNYDTLQQDNEALLKEIKELKSRLLLQEESNTESDVSVKEEMITLQDSNPLCETAIPGSESKELSYECFNKSDEVLGFKDGSSDSDSSAILNEENANNNDNSPNNATISSSGAMQSQSFLSSSSPMNCFQFQKQFPTQYVKMEEHNFLSADEACNFFSDEQAPTLQWYCSEEWS

SEQ ID NO: 11151 - protein, 152 aa, Zea mays
MVKAVAVLGSSDGVKGTIFFTQEGDGPTAVTGSVSGLKPGLHGFHVHALGDTTNGCMSTGHDYNPASKEHGAPEDENRHAGDLGNVTAGADGVANINVTDSQIPLTGPNSIIGRAVVVHADPDDLGKGGHELSKSTGNAGGRVACGIIGLQG

SEQ ID NO: 11152 - protein, 271 aa, Zea mays
MGIVEEAHNLRVVGEGKRGVIVLAHGFGTDQSVWKHLVPHLVANYRVVLFDTMGAGPTNPDYFDFSRYATLEGYALDLLAILQELGVQSCIYVGHSVSAIIGALASISRPDLFTKLVLLSASPRYLNDVDYYGGFEQDELDELFEAMQSNYKAWCLGFAPLCVGGDMESVAVQEFSRTLFNIRPDIALNVAQTIFQSDVRSLLPHVSVPCHIVQSTKDLAVPVVVSEYLHRHLGGDSIVEVMPSEGHLPQLSSPDIVTPVLLRHIQHDIAV

SEQ ID NO: 11153 - protein, 458 aa, Lycopersicon esculentum
MAKTNGFMGHDMLAPFTAAWMIDMGPLVIDKAEGSYVYGVNGKKYLDSLSGLWCTVLGGSEPRLIEAASKQLNKSAFYHSFWNRTTKPSLDLAKELINMFTANKMGKVFFTSSGSEANDTQVKLVWYYNNAIGRPNKKKIISRKNAYHGSTYMTAGLSGLPSLHLKFDLPPPYILHTDCPHYWNYHLPGETEEEYSTRLANNLENLILKEGPETVAAFIAEPVMGGAGVIIPPATYFEKIQAVLKKYDILFIADEVICGFGRLGTMFGCDKYNIKPDLVSIAKALSGGYIPIGAVLVSEEISKVIMSQSNQLGVFCHGFTYSGHPVACAVALEALKIYKEKNITEVVNKLSPKLQEGLKAFIDSPIIGEIRGTGLVLSTEFVDNKSPNDPFPPEWGVGTYFGSQCQKHGMLVSFSGDHVNMAPPFTLSLEELDEMISIYGKALKDTEKRVEELKSQKK

SEQ ID NO: 11154 - protein, 536 aa, Streptomyces rochei
MPNFAYPDLPVDGLLRRAARRAPDRVAVRTATRSVGFAELDAWADRIAGFLHRTLDGAAGARVGVANVLDPVFAAAYYGTARSGAVTVLVNPLAGEDALRHVFTTARVELALVPAATAGLLANVRADLPALRAIIVTDAPGGVVPDGTVPLHQAVDAAPERTPVRPPRTAAAPADPDTVACVQFTTGTTGRPKGVLLTHRNLVANAKQVALAHRVGADSVTVNHLPLYHVMHLNSGVYAGACQVLCPDPDPIASLAVAAAAGATHYYGLPARLHALAEDERLTGAVRPGPRLTAVLSGGSALSPRAAGILRERLGVPVIQGYGMAELSPLTHCQQPDGYRPGLVGAVVPGTECRLVDLATRHPVGTGAIGEVQVRGPQLMAGYLDGGHEERIDADGWFATGDVGLLDAGGALRLVDRLCDVFKHDNEIVAPSRVEDIVRQDSRVADCVVADWPDPEHGAAVWAGVVLAAGAGHEPTAADTRPGAGILDSITARANEHLAPWERIRFAEAIDAVPRTPTGKPQRRLVRNELRRRAAV

SEQ ID NO: 11155 - protein, 504 aa, Thermobifida fusca
MPAAGPRPPSHREPRCPLRCSGCAAAVTHKSIPSSLPTPAQPGPSRTAAPSTGATSGPHDPDHGCITVQRRGYPEQTTIPGDRSGPMSPRPSGADSVPASWSAEQHIAVAERRSAHNYHPLPVVIAHGEGAWVTDVAGRRYLDCLAGYSAVNFGHRNPELLAAARAQLDRITLTSRAFHHDRFAPFVAALADLVGKEQVLPVNTGAEAVETGIKIARKWGYEVKGVPDGRAVIVVASGNFHGRTTTIVSFSTDPAAYRGFGPPTPGFRIVPYGDAAALADAIDADTVAVLVEPVQGEAGVIVPPADYLPRVRDLCTRAGILLIADEVQSGLGRTGTVRACDHSGVDADIYLFGKALGGGILPVAAAVGDAEVFDVIRPGQHGSTFGGNALACAVGTAVVSLVRDGPYLDHVRALAPVLRARLDQLVGNGVVAARSIGLWAGIDVDPTLATGRELCERLLQRGVLVKDTHGSTIRLSPPLVITEDELHWAVDQIAAVLADLRAGR

SEQ ID NO: 11156 - protein, 237 aa, Zea mays; identical to SEQ ID NO: 3963

SEQ ID NO: 11157 - protein, 326 aa, Cyanidioschyzon merolae
MLHKLFMYEALREAIDEEMARDKRVFVLGEDVGHYGGSYKVTKQLHTKYGDLRVLDTPIAENSFTGMAIGAAMTGLKPVVEGMNLSFLLLAFNQISNNAGMLHYTSGGNWSIPLVIRGPGGIGKQLSAEHSQRIEAYFQAVPGLKIVACSTPYNAKGLLKAAIRDNNPVLFLEHVLLYNLKQEIPKQEYVLPLDKAQVVREGSDVTIITYSRMLHHVMQAVKQLVAQGMNPEVIDLISLKPIDLETLVTSVSKTHKAIIVEECMQTGGIAAEVMAQIYSHAFDELDAPIRRLSSKDVPTPYNGYLEQACLVQPTQIVEAVKTLMST

SEQ ID NO: 11158 - protein, 245 aa, Rhizobium sp. N33
MFELTGRKALVTGASGGIGEAIARVLHAQGAIVGLHGTRVEKLETLAAELGDRVKLFPANLSNRDEVKALGQKAEADLEGVDILVNNAGITKDGLFVRMSDADWDTVLEVNLTAVFRLTRELTHPMMRRRHGRIINITSVVGVTGNPGQTNYCASKAGMIGFSKSLAQEIATRNITVNCVAPGFIESAMTDKLNDKQKEAIMAAIPTRRMGTSVEVASAVAYLASNEAAYVTGQTIHVNGGLAMI

SEQ ID NO: 11159 - protein, 138 aa, Triticum aestivum
MNTQRKPGDWNCNSCQHLNFSRRDFCQRCRATRSDLQLGDGRCIGGVLTSLDVRPGDWYCNCGYHNFASRSSCLKCGTIVRDFPAGQGGTGAAESGGVRAGWKTGDWICTRPGCNVHNFASRIECYHCNAPREAGTGK

SEQ ID NO: 11160 - protein, 99 aa, Glycine max
MAISNSMDFLQLFIAVFIAFSIAFRAHRKKSLSTSGAIAGFFVMALHIFVGYRFGAMLLAFFYSSSTLTKVGEDIKRIVDPEFKEGGQRNWIQVLANSG

SEQ ID NO: 11161 - protein, 307 aa, Trichodesmium erythraeum IMS101
MQPKLIIHGGAGSSLDEKGGLEIVRKSLHRIVDELYNLLLGDTAALDIVIRGCQMLEDDPIFNAGTGSVLQSDGQIRMSASLMDGLNHRFSGVINVSRIKNPIDLARALQESPDRVLSDSGAAEFVRELQMPVYNPLTDKRLNEWLEDRKQNFNRKMANVVTVSPGTGTIGVVALDKEGRLAAGTSTGGKGFEKIGRVSDSAMPAGNYATDSAAVSCTGIGEDIIDECLAAKIVIRVTDGFSIKAAFERSFAEAHEHKRDLGAIGIDAGGTINWGKTCDVILAAFHDGEKIGDSLEADKGKSTFSVE

SEQ ID NO: 11162 - protein, 525 aa, Brassica rapa subsp. pekinensis
  unsure (1)..(525): unsure at all Xaa locations
MPLTEXIYNHLSLFDLSLALLGLFVFCCLREKLTNKHGPMLWPVFGITLEFFIHKNDVYAWVTKSLKKSRNTFLYRGFWLDGSHGAVTCSPANVEYMLKTNFKNFPKGTFFKDRFKDLLEEGIFNADDESWKEQRRVIITEMHSTRFMEHSFQTTQRLVRKKLLKVMESFARSQEAFDLQDVLLRLTFDIICIAGLGDDPETPAQDLPQVPFAKAFDEATESTLFRFMIPPFIWKPMRFLDIGYEKGLRKAIDVVHGFVNKMIMDRICMVNDDETLDNRSVLTRIIQIESHKKGNEIGPSTIRFFRQFCTSFILAGRDTSSVAISWFFWVIQRHPQVENKIIQEIREILKQRGDPSDSSLFTVRELNNMVYLQAAISETLRLYPPIPMEMKQAIEDDMFPDGTFIKKGSRVYFSIYAMGRMESVWGKDCEDFGPERWIHAGKFVSGDQSKYVVFNAGPRLCLGKTFAYLQMKMIAASVLLRYSIKVAQDHVVVPRVTTNLYMKYGLKVTITPRSLEEKILESFHM

SEQ ID NO: 11163 - protein, 559 aa, Penicillium chrysogenum
MSPFITTHVWKDDGSTTPIVSNPNVPIYGDGEMSDNSEIENAAGQLKEIHEFRQGLHQRHIQMIALAGTVGTGIFLSSGRAIVEAGPLGAFLAYTIIGATVASVVYGVGEMGALVPLNGGVIRYAEIFCDPALAFANGWNQIYSYCVSIPSEIVAAAVIIEFWITVNNAIWITVLGLLMLSTAFVFVRVYGELEFGFSILKIMLIIGVNLMALVITCGGAPNKSSIGFAYWKAPYGPFVQYLGVGGPLGRFLGFWKTFDNALFAYSGIENFTLAAAETRNPRHSIPMAARRIFVRILLFYVITIFMIGLIVSSADKRLLGSSGTASQSPFVIAARHAGIKVVPSIINAVVLTSAWSSGNSNILGGSRILYGMATQGHAPAVFTRINRFGIPWVAVALYGVFMSLGYMSLSSSASTVFTWLQNLVSISTLVNLMCICIVYLRFYYGCKKQGIDRFKELPWAAPFQPYITWISLFIYVVLFFTGGFTTFMRGHWSTATFVSTYFNLPFIVIVYFAYKFWAKTKIIPLAEIPIRPFIESWHKNPEPEPKPKRGLSKLNILWS

SEQ ID NO: 11164 - protein, 470 aa, Pasteurella multocida
MSNKKIGLLSLTALVLSSMIGSGIFSLPQNMAEVAGAQALVIGWIITGIGIIFLGLSFFFISRLRPELDGGIYTYAREGFGDLVGFLSAWGYWLCATIGSVGYLVVAFEGIGLFTDSPNRIIFAQGNTIFAFLGSSLVVWLVHWLITRGVKEAAFLNLLATFVKAFPLVLFIVLAAWFFSPETFNHDIQATNLNHSITDQVKNTMLITLWVFVGVEGAAVLSAHAKKRSDVGLATVLGIVIALILYVAITVLSLGILPREMIANMPNPSMAGLLEHLIGSSGKIIITACLIVSVLASYISWTMYSAEVPYRGAQNGAFPKILNKINENDTPINSLWFTNLVVQFCLVLVLMTGKSYNALLLISTSMILVPYFLIGAYLLKLSIQQNSAWYIKLTGLLASIYGVWILYAAGLDHLLLSILLYVPGIGIYLYSRYQHQGKLHFNQKEKALLLFIAIAFVLAIYNSAVNVNWN

SEQ ID NO: 11165 - protein, 1121 aa, Ceratodon purpureus
MSAPKKTYSSTTSAKSKHSVRVAQTTADAALEAVYEMSGDSGDSFDYSKSVGQSAESVPAGAVTAYLQRMQRGGLIQTFGCMVAVEEPNFCVIAYSENASEFLDLMPQAVPSMGEMDVLGIGTDIRTLFTPSSGAALEKAAATQDISLLNPITVHCRRSGKPLYAIAHRIDIGIVIDFEAVKMNDVSVSAAGALQSHKLAAKAITRLQALPGGDIGLLCDTVVEEVRELTGYDRVMAYKFHEDEHGEVVAEIRRMDLEPYLGLHYPATDIPQASRFLFMKNRVRVIADCCASPVKLIQDPDIKQPVSLAGSTLRAPHGCHAQYMGNMGSIASLVMAVIINDNEEDSRGAIQRGRKLWGLVVCHHTSPRTVPFPLRSACEFLMQVFGMQLNMEVELAAQLREKHILRTQTLLCDMLLRDAPIGIVSQTPNIMDLVKCDGAALYYGKRFWLLGTTPTENQIKDIAEWLLEYHKDSTGLSTDSLADANYPGAHLLGDAVCGMAAAKITAKDFLFWFRSHTAKEVKWGGAKHDPAEKDDGRKMHPRSSFKAFLEVVKRRSLPWEDVEMDAIHSLQLILRGSFQDIDDSDTKTMIHARLNDLKLHGMDELSVVANEMVRLIETATAPILAVDSTGMINGWNAKIAHVTGLPVSEAMGRSLVKDLVLDESVVVVERLLYLASQGEEEQNVEIKLKTFGTQTEKEAVILIVNACSSRDVSDSVVGVCFVGQDVTGQKMFMDKFTRIQGDYKTIVKNPHPLIPPIFGGDEYGYCFEWNPAMEALTGWKHDEVVGKLLVGEIFGMEMMCCRLKSQDSMTKFMISLNNAMDGTNTDKFSFSFCNREGKFVEALLSTNKRTNADGVITGVFCFLQIASSELQQALTVQRATEKVAIAKLKELAYIRQEIKNPLCGITFTRQLLEDTDLSDDQKQFLDTSAVCEQQLQKVLNDMDLESIEDGYLELDTAEFEMGTVMDAVISQGMTTSREKGLQIIRETPREISTMRLFGDQIRLQQVLSDFLINAIRFTPSSEGWVKIKVVPTRKRLGGNVHVMHLEFRVSHPGGGLPDELVLEMYDRAKGMTQEGLGLNMCRKLVRLMNGDVQYVRENAQCYFVVYVELPMAQRDDAASQM

SEQ ID NO: 11166 - protein, 379 aa, Neurospora crassa
MFHHTHGYKSHSLQLELVHRPSGPIIPGHTFRVSAVPAPVPSDLNEGDLLLETLYISLDPAMRGWLDDVRSYVPPVQIGEVMRAFCICRVLASRSPKAAAGDIVTAMNGIREIGILSDRHIEKPAFLPPGGKTTDLLGVLGMTGLTAYFGMMKIGNVKRGDTVVVSAAAGATGSVAVQIARIQGAKRVVGTAGSDEKCRWLVEEGGADVALNYKDPEFRRKFKEATPDFVDVYFDNVGGEQLNMALARANRGARFVMCGGISQYNAEHKQGPKVGGFHLLGTISAMECSTDKFQNINNVITMRIRMEGFIVFDYKDEYPTALGQLAQWLAEGKLKRKETILKGGVRVADEGMVQLYKGGNIGKLLIEVKNPDEERQSRL

SEQ ID NO: 11167 - protein, 173 aa, Helicobacter pylori
MNLDQLEVSHDADSLCVVIEISKHSNIKYELDKESGALMVDRVLYGAQNYPANYGFVPNTLGSDGDPVDALVLSDVAFQAGSVVKARLVGVLNMEDESGMDEKLIALPIDKIDPTHSYVKDIDDLSKHTLDKIKHFFETYKDLEPNKWVKVKGFENKESAIKVLEKAIKAYQG

SEQ ID NO: 11168 - protein, 292 aa, Saccharomyces cerevisiae
TLVHVASVEKGRSYEDFQKVYNAIALKLREDDEYDNYIGYGPVLVRLAWHISGTWDKHDNTGGSYGGTYRFKKEFNDPSNAGLQNGFKFLEPIHKEFPWISSGDLFSLGGVTAVQEMQGPKIPWRCGRVDTPEDTTPDNGRLPDADKDAGYVRTFFQRLNMNDREVVALMGAGALGKTHLKNSGYEGPWGAANNVFTNEFYLNLLNEDWKLEKNDANNEQWDSKSGYMMLPTDYSLIQDPKYLSIVKEYANDQDKFFKDFSKAFEKLLENGITFPKDAPSPFIFKTLEEQGL

SEQ ID NO: 11169 - protein, 361 aa, Ferroplasma acidarmanus
MSHNYPVSQVLNRDYKFYLMKYVNVGKSGLKVSTVAIGTWHLPGSGQFVNKVESVNEEEFKKIFKKAYDFGINFYDTADIYHGRVENNEDCIECTGNSERVLGNIIKDYDRESLVISTKVAGPMNYYVNSSGLSRKHIMHGIKSSLERLKTDYVDLYQFHWSDNDTPLIETLKAMSHIVDLDLSRYIGMSNVNACDIPEFMNLSEKYNLNNFITMQEAYNILDRKIENDKILYAQRYNLGLLAYIPLDQGILAGKYLNNYGKGSRITYYSGLQNEIDRTLNTVKKLKEFADENDITLSQLAIAWLLKRGAELNIKIIPLLGITNIKYLDDNINALNVNLKDEDMKYINEISSSYANSKINH

SEQ ID NO: 11170 - protein, 178 aa, Brassica napus
MENMGTRVIEPLIVGRVVGDVLDNFTPTIKMNVSYNKKQVSNGHELFPLAVSSKPRVEIHDGDLRSFFTLVMTDPDVPNPSDPFLKERLHWLVMNIPGTTDATFGKEVVSYELPKPNIGIHRYVFVLFRQKQRRVKFPSNIISRDQFNTREFAIENDLGLPVAAVFFNAQRETASRRR

SEQ ID NO: 11171 - protein, 198 aa, Oryza latifolia
GQTPMFPRIFGHEAGGIVESVGEGVTDLAPGDHVLPVFTGECKECPHCKSAESNMCDLLRINTDRGVMIGDGKSRFSINGKPIYHFVGTSTFSEYTVMHVGCVAKINPAAPLDKVCVLSCGISTGLGATINVAKPPKGSTVAIFGLGAVSLAAAEGARIAGASRIIGIDLNANRFEEARKFGCTEFVNPKDHDKPVQQ

SEQ ID NO: 11172 - protein, 345 aa, SYNECHOCOCCUS SP. WH 8102
MMGVHCVTNPLAQLLITGGAGFIGSHTGLVLLEAGHELLVFDDFSNSSPIALERVRELAGPAAAPRLRQMQGDIRSPRNLEQAFTKAPSGIDAVIHFAGLKAVGESVEKPLHYWDVNLNGSRCLLEAMDAHSCHTLVFSSSATVYGNPETVPIPATAPISPINPYGHTKAAVERMLSDLHASAQDAWRIACLRYFNPVGAHPSGRIGENPLGIPNNLFPFVSQVANGRREQLQVFGGDWPTPDGTGVRDYIHVMDLADGHRAALDCLLAEATQMVTLNLGSGQGQSVLEVVQSMQAASGRSIPNTITDRRPGDAAQRLGWRTQRSLEDICRDGWAWQQQNPERYT

SEQ ID NO: 11173 - protein, 198 aa, Glycine max
MSSLATIFLFLVLPNAHTKSLCSTTDEAWSLEIGFVQQQILGLSHWLKHFTISVSTFYLPMMASSTVLFTLVAALFVTSVVAQSPASSPALSPKRTPVLATPQKSPSPAISPSAVSPSSSPPAPTVNAPSPSPTSVDSPPSPPLSPSDSPAGVPSVTPSAISSPPSEAPAPSQNGAALNRFTVAGSAAVVVFAAALLM

SEQ ID NO: 11174 - protein, 335 aa, Streptomyces rochei
MTDTAEPDPYVRLGRLATRVSRLWLGTVNFSGRVTDEDALRLMDEALDRGINCVDTADIYGWRVHKGHTEELVGRWLARGGGRRDRVVLATKVGGEMSERVNDGGLSARHIVTACEQSLRRLGVECIDLYQMHHIDRAAPWDEVWQAMDRLVASGKICYVGSSNFAGWHISEAQASARRRGSLGLASEQCLYNLAVRHAELEVLPAARHHGLAAVAWSPLHGGLLSGVLDKLRSGTAVKSAQGRAQTLLPALRPAIEEYEAFCRGIGHHPAEVGLSWVLSRPGVTGAVIGPRTTGHLDSALRATRLRLGDAELAALDRIFPPVGQGGPAPEAWAH

SEQ ID NO: 11175 - protein, 449 aa, Lactobacillus plantarum WCFS1
MISQNHRLDQQLIEREDHYMATAARINYYDLVIDHAHGALLTDVDGNQYIDLLASASAINVGHTHPRVVKAIQEQAAKLIHYTPAYFHHQPEQRLAERLAKSAPGTDNEVVFGNSGSDANDAIIKFARAYTNRQYIVAYTDAYHGSTYGSMSLSGVSLNMVRKMGPLLPGIVHVPYPDCYRTLPHETEHELALRYFEAFKAPFDSYLPAEETACVIIEPIQGDGGIRKAPAEYVQLVYDFCHQHGILFAVDEVNQGMGRTGKMWSIQNFPGIRPDLMSVGKSLASGLPLSAVIGRREVMESLAAPAHTFTTAANPVCCAAALATIDVLADEQLVARSANYGRYAKEQFLALQQRHPKIGQVRMYGLNGGIELVTDRQSQQPDPDFASDVIYAAFERGVVMITLKGNILRFQPPLVITKTQLDTALTVLDEAMAAAEQGLVKRPQGKIGW

SEQ ID NO: 11176 - protein, 605 aa, Geobacter metallireducens
MQTIVDLLEESCRRFPDKTALRCKNGGRWQDVSYRDFRIASDRIATGLVNSGFRAGDHAALLAPSSPRWMMVYLGILKAGGVVVPVDKELKSLELRHILSDSGARVLFTERSSLETVLAMGEDVPALDLIVTLDGGNGNRGGDEDETSGEQPDDSLQLHHEKSPMMGTLARQFNELLDAEASGDASGQGAGLTGSAGAGIAADQVKILPYEKLRGTTAISPKGPSPLDTAIILYTSGTTGRSKGAMLSHANITSNILATSAHFNLDERVHTLSFLPINHVFEQVCGILLPLSLGGTVSFVESLKKLGDNLAEVKPTFLLGVPAVYRMILDRITRNIESKILSRLLYSFSLTRPLIKAKIRKTLGKGTIFVSGGAALDPDVAAGLVRLGVTICQGYGITETSPVISAECPGAMRLGTAGRVLAGVEVRITDPNDEMVGEILVKGPNVMQGYYRDDPATAEVLVDGWYRTGDLGFLDGDGFLSIRGRVKNLIVTANGRNVYPEEVENEILKSPYIAEVVVHGRRVGAVAEEIHAMVYPDGDALDDYRRSQGKNSLSGEEVAALVRAEVQAACEKLAPYKRVKRITIRTDEFPKTTTRKIKRFAVQAA

SEQ ID NO: 11177 - protein, 375 aa, Archaeoglobus fulgidus DSM 4304
MDWIEREKKHILQTYTRQKVVIERGEGCYVYDVNGKRYLDLVAGIATVSIGHCNSHLVERLKEQLEKLIHISNLYYTTPQVELAEKLSEIAGMDRFFFCNSGAEAVEAALKFARRATGRKKFVSFTGDFHGRTMGALSVTHKEKFRKPFEPLVSPVEFAEFNNPESLEKVVDEETAAVIVELVQGEAGVYPADREFVKAIEELREKYGFLLIVDEVQTGFGRTGRWFAKDHYGIEPDMITMAKAMGSGVPIGCCALKEEVAEKIQVGDHGSTFGGNPLACTAALATIEVIEREGLVENSARMGEYFVKRLKESFENVIGVGLMIGFDVGDAAEFVRKCLENGLLVNNTSERRIRLVPPLVITEREVDKAVEIMLN

SEQ ID NO: 11178 - protein, 129 aa, Zea mays
MAKYNVVQKNKRQCNQDRKRAAHGEPGTGKLKQRTAPVSMSGKRKKKLERRLNRKQKEAAMIKALENNMGDVDMISVEGSSEAAKGKSQVKFSVKKNSRIQIKRLKGKGRKKAKNAKPPAKERVDAMVE

SEQ ID NO: 11179 - protein, 444 aa, Oryza sativa (japonica cultivar-group); identical to SEQ ID NO: 975

SEQ ID NO: 11180 - protein, 403 aa, Glycine max
MAATLFQGLGVVTPSFSSSHSNKFMLSSLSERKDGIFVVRSDADARILKTGARKHELLVTNAVATKGASSAASTSKSGSGHELLLFEALREGLEEEMERDPCVCVMGEDVGHYGGSYKVTKGLAPKFGDLRVLDTPIAENAFMGMGIGAAMTGLRPVVEGMNMGFLLLAFNQISNNCGMLHYTSGGQFKIPIVIRGPGGVGRQLGAEHSQRLESYFQSIPGIQMVACSTPYNAKGLMKAAIRSENPVILFEHVLLYNLKERIPDEEYVLSLEEAEMVRPGEHVTILTYSRMRYHVMQAAKTLVNKGYDPEVIDIRSLKPFDLHTIGNSVKKTHRVLIVEECMRTGGIGASLTAAITENFHDHLDAPIVCLSSQDVPTPYAGTLEEWTVVQPAQIVTAVEQLCQ

SEQ ID NO: 11181 - protein, 148 aa, Fagus sylvatica
MADQLTDDQISEFKEAFSLFDKDGDGCITTKELGTVMRSLGQNPTEAELQDMINEVDRDGNGTIDFPEFLNLMARKMKDTDSEEELKEAFRVFDKDQNGFISAAELRHVMTNLGEKLTDEVDEMIREADVDGDGQINYEEFVKVMMAK

SEQ ID NO: 11182 - protein, 340 aa, Xanthomonas campestris pv. campestris str. ATCC 33913
MKALVKREASKGIWLEQVPVPTPGPNEVLIKLEKTAICGTDLHIYLWDEWSQRTITPGLTIGHEFVGRVAELGSAVTGYQVGQRVSAEGHIVCGHCRNCRGGRPHLCPNTVGIGVNVNGAFAEYMVMPASNLWPIPDQIPSELAAFFDPYGNAAHCALEFDVIGEDVLITGAGPIGIIAAGICKHIGARNVVVTDVNDFRLKLAADLGATRVVNVSKTSLKDVMADLHMEGFDVGLEMSGNPRAFNDMLDCMYHGGKIAMLGIMPRGAGCDWDKIIFKGLTVQGIYGRKMYETWYKMTQLVLSGFPLQKVLTHQLSIDEFQKGFDLMEEGKAGKVVLSWN

SEQ ID NO: 11183 - protein, 378 aa, Phanerochaete chrysosporium
MAFKSLIAFVALAAAVRAAPTAVCPDGTRVSHAACCAFIPLAQDLQETIFQNECGEDAHEVIRLTFHDAIAISRLQGPKAGGGADGSMLLFPTVEPNFSANNGIDDSVNNLIPFMQKHNTISAADLVQFAGAVALSNCPGAPRLEFLAGRPNKTIAAVDGLIPEPQDSVTKILQRFEDAGGFTPFEVVSLLASHSVARADKVDQTIDAAPFDSTPFTFDTQVFLEVLLKGVGFPGSANNTGEVASPLPLGSGSDTGEMRLQSDFALAHDPRTACIWQGFVNEQAFMAASFRAAMSKLAVLGHNRNSLIDCSDVVPVPKPATGQPAMFPASTGPQDLELSCPSERFPTLTTQPGASQSLIAHCPDGSMSCPGVQFNGPA

SEQ ID NO: 11184 - protein, 266 aa, Magnetospirillum magnetotacticum
RMRASRASSARAPDMAALAARHAVVTGGARGIGRAIAARLTREGATVTVLGRNAEALERAVAEGAAHHAVPVDVTDETAVAQAFAALAARAPVDILVANAGAAESAPFGRSDAALFQRMLDVNLFGAVHAAQAVLPGMTERGFGRIVAIASTAAQKGYPYVSAYCAAKHAVVGLVRSLAQETARTGITVNAVCPGFTDTDIVGDSLERIVATTGRDRDAALASLVRHNPQGRLVQPEEVADAVAWLCGASATAITGQTIAVAGGEV

SEQ ID NO: 11185 - protein, 432 aa, Tropheryma whipplei str. Twist
MSKIKLVTAIPGPESERLHRMRQATVARGVSSTFPIYIKESHGSILIDEDGNHLIDMGCGIGVTTLGHSHPAVVDAARAQINSVWHTLFSITPYESYVEVCKLLAKNTPGDFPKKSLLLNSGAEAVENAVKISRAYTGRPTVAVLDRSFHGRTNLTSSMTYRGSLYSSDFGPTASNIVSAPNSYPLHDRLSGKEAAARTISYLETRVAARNIACLFYEPIQGEGGVIVPADGFLPALQDWCRENDIVFVADEIQSGFGRTGCFFASETDGLEPDIVCSAKGIANGLPLSAVTGRSDIVDAARPGTLGGTFTGNHVSCAAALEVFEQYKDNAPLDSASRLGDILKELLLNLQSKHPQIAEVRGRGAMFGAEFSGNHAGEMVSRVITRAAELGVIFLSSGVEGNVVRFLPNVFMDKETIEEAIGVLDSAISSVV

SEQ ID NO: 11186 - protein, 99 aa, Triticum aestivum
MLEGKATVEDTDMPAKMQLQATSAASRALDRFDVLDCRSIAAHIKKEFDTIHGPGWQCVVGCSFGCYFTHSKGSFIYFKLESLRFLVFKGMADEQPLPC

SEQ ID NO: 11187 - protein, 155 aa, Oryza sativa
  unsure (1)..(155): unsure at all Xaa locations
XLQEWHEGKCXDQKVLRRXXKKGSKNTXPITKTENCESFFNFFSPPQVPDDDEEIDEDTAEQLQNQMEQDYDIGSTIRDKIIPHAVSWFTGEAAQDEDFEGIMDDEDDDDEDDDDDEDEDDEGDDEDDEDXXKKGGRVPAGEGQQGERPAECKQQ

SEQ ID NO: 11188 - protein, 184 aa, Vibrio cholerae
MMSSIRSYKGIVPKLGEGVYVDSSAVLVGDIELGDDASIWPLVAARGDVNHIRIGKRTNIQDGSVLHVTHKNAENPNGYPLCIGDDVTIGHKVMLHGCTIHDRVLVGMGSIVLDGAVIENDVMIGAGSLVPPGKRLESGFLYMGSPVKQARPLNDKERAFLVKSSSNYVQSKNDYLNDVKTVRE

SEQ ID NO: 11189 - protein, 154 aa, Zea mays
FWFVGEREEMAASDVEYRCFVGGLAWATDDHSLNNAFSTYGEVLESKIILDRETQRSRGFGFVTFSTEDAMRSAIEGMNGKELDGRNITVNEAQSRGGRGGGGGGYGGGRRDGGGYGGGGGGYGGGRGGYGGGGGYGGANRGGGYGNNDGNWRN

SEQ ID NO: 11190 - protein, 529 aa, Marchantia polymorpha
MDSRAQNRDGGEDVKQELLSAGDDGKVPCPTVAIGIRQRLPDFLQSVNMKYVKLGYHYLITHAMFLLTLPAFFLVAAEIGRLGHERIYRELWTHLHLNLVSIMACSSALVAGATLYFMSRPRPVYLVEFACYRPDERLKVSKDFFLDMSRRTGLFSSSSMDFQTKITQRSGLGDETYLPPAILASPPNPCMREAREEAAMVMFGALDELFEQTGVKPKEIGVLVVNCSLFNPTPSMSAMIVNHYHMRGNIKSLNLGGMGCSAGLISIDLARDLLQVHGNTYAVVVSTENITLNWYFGDDRSKLMSNCIFRMGGAAVLLSNKRRERRRAKYELLHTVRTHKGADDKCFRCVYQEEDSTGSLGVSLSRELMAVAGNALKANITTLGPLVLPLSEQILFFASLVARKFLNMKMKPYIPDFKLAFEHFCIHAGGRAVLDELEKNLDLTEWHMEPSRMTLYRFGNTSSSSLWYELAYTEAQGRVKRGDRLWQIAFGSGFKCNSAVWRALRTVKPPVNNAWSDVIDRFPVKLPQF

SEQ ID NO: 11191 - protein, 366 aa, Oryza sativa (japonica cultivar-group)
MASNGMASSPSSFFPPNFLLHMAQQQAAPPHDPQEHHHHHHHGHHGHHHEQQQQQQHHHHLGPPPPPPPHPHNPFLPSSAQCPSLQEFRGMAPMLGKRPMSYGDGGGGGDEVNGGGEDELSDDGSQAGEKKRRLNVEQVRTLEKNFELGNKLEPERKMQLARALGLQPRQVAIWFQNRRARWKTKQLEKDYDALKRQLDAVKAENDALLNHNKKLQAEIVALKGREAASELINLNKETEASCSNRSENSSEINLDISRTPPPDAAALDTAPTAHHHHHGGGGGGGGGGGMIPFYTSIARPASGGGVDIDQLLHSSSGGAGGPKMEHHGGGGNVQAASVDTASFGNLLCGVDEPPPFWPWPDHQHFH

SEQ ID NO: 11192 - protein, 425 aa, Brassica rapa
TSFLLVFVVMILFRPTLSIYFNTLSSTESLTISNSRTLVSPGDVFELGFFKTTSSSRWYLGIWYKKLPGRTYVWVANRDNPLSNSIGTLKISNMNLVILDHSNKSVWSTNHTRGNERSLVVAELLANGNFLMRDSNSNDAYGFLWQSFDYPTDTLLPEMKLGYDLKIGLNRSLTSWRSPDDPSSGYFSYKLEGSRRLPEFYLMQGDVREHRSGPWNGIQFIGIPEDQKSSYMMYNFTDNSEEVAYTFVMTNNGIYSRLKLSSDGYLERLTWAPSSGAWNVFWSSPNHQCDMYRMCGTYSYCDVNTSPSCNCIPGFNPKNRQQWDLRIPISGCKRRTRLSCNGDGFTRMKNMKLPDTTMAIVDRSMGVKECEKRCLSDCNCTAFANADIRNGGTGCVIWTGELEDMRNYAEGGQELYVRLAAADLG

SEQ ID NO: 11193 - protein, 386 aa, Glycine max
  unsure (1)..(386): unsure at all Xaa locations
MAKEGPNWDGLLKWSIAHSDGTRPTRNLSEEDRRWFMEAMQSQTIDVVKRMKEITLVMQTPEQVLKDQGVTPADIEDMLDELQEHVESIDMANDLHSIGGLVPLLGYLKSSHANIRAKAADVVTTIVQNNPRSQQLVMEANGXEPLIFNFSSVQNNPGSQQLVMEATALIRHNKQVITVFRLANGYAALKDALASENVRFQRKVSQNLTHYLLHAXNSGNVSVHELGSQLDPLPCSSENTFRTATIVNGXLGFVRKSEDSKDCNEESSVKKAPLRQVRLHDNSLMAAEDLGVVREERQLVDSLWSTCFNEPSSLREKGLLVLPGEDAPPPDVASKFFEPPLRSSTANPSSKKDSNNEKKEIPLLLGSGPSLADTNNQGSNRENANS

SEQ ID NO: 11194 - protein, 215 aa, Hordeum vulgare subsp. vulgare
MSQEDSTSAAAAQQPTSRPAPKLNERILSSLSRRGGGAHPWHDLEIGPGAPAVFNVVVEITKGSKVKYELDKKTGLIKVDRVLYSSVVYPHNYGFIPRTLCEDNDPMDVLVLMQEPVIPGSFLRARAIGLMPMIDQGEKDDKIIAVCADDPEYRHYSTSVSLLPRLQEIKRLEDYKKNENKEVAVDAFLPATTAREAIQYSMDLYAQYILQSLRQ

SEQ ID NO: 11195 - protein, 263 aa, Zea mays; identical to SEQ ID NO: 5024

SEQ ID NO: 11196 - protein, 294 aa, Saccharomyces cerevisiae
TTPLVHVASVEKGRSYEDFQKVYNAIALKLREDDEYDNYIGYGPVLVRLAWHTSGTWDKHDNTGGSYGGTYRFKKEFNDPSNAGLQNGFKFLEPIHKEFPWISSGDLFSLGGVTAVQEMQGPKIPWRCGRVDTPEDTTPDNGRLPDADKDADYVRTFFQRLNMNDREVVALMGAHTLGKTHLKNSGYEGPWTANNNVFDNSFYLNLLNEDWKLEKNDANNEQWDSKSGYMMLPTDYSLIQDPKYLSIVKEYANDQDKFFKDFSKAFEKLLENGITFPKDAPSPFIFKTLEEQGL

SEQ ID NO: 11197 - protein, 72 aa, Calopogonium mucunoides
WEYQVGPSVGIEGGDHIWASRYILERITEQAGVVLALDPKPIEGDWNGAGCHTNYSTKSMREDGGFEVIKKA

SEQ ID NO: 11198 - protein, 466 aa, Salmonella enterica subsp. enterica serovar Typhi
MGQLSESHALGGGLKSRHVTMLSIAGVIGASLFVGSSVAIAEAGPAVLLAYLFAGLLVVMIMRMLAEMAVATPDTGSFSTYADKAIGPWAGYTIGWLYWWFWVLVIPLEANIAAIILNSWIPGIPVWLFSLVITLALTGSNLLSVKNYGEFEFWLALSKVIAILAFIALGAAAISGFYPYAEVSGISRLWDHGGFMPNGFGAVLSAMLITMFSFMGAEIVTIAAAESDTPDKHIVRATNSVIWRISIFYLCSIFVVVALIPWNMPGLKSVGSYRSVLELLHIPHAKFIMDCVILLSVTSCLNSALYTASRMLYSLSRRGDAPAIMGKTNRSKTPWVAVLLSTGAAFLTVIVNYYAPAKVFKFLIDSSGAIALLVYLVIAISQLRMRKILLAQGGEIKLKMWLYPWLTWLVIGFICFVLVVMLFRPAQQLEVISTGLLGLGIIGTVPIMSRWKKLIRWQKAPLQNLR

SEQ ID NO: 11199 - protein, 124 aa, Oryza sativa
MLRKGEAPGHQTPPHLHKDDGDDDDDAPSGFVKLISAEGFEFVVDKKAAMVSNTLRNMLTSPGGFSETREGEVRFPEISTPILEKICQYFYWSLHYSSGKETSEFQIEPEITLELMMAANYLDT

SEQ ID NO: 11200 - protein, 496 aa, Thlaspi arvense
MDLLYIVAALVIFASLLIAKSKRKPKKNLPPGPPRLPIIGNLHQLGEKPHRAMVELSKTYGPLMSLKLGSVTTVVATSVETVRDVLKTYDLECCSRPYMTYPARITYNLKDLVFSPYDKYWRQVRKLTVVELYTAKRVQSFRHIREEEVASFVRFNKQAASSEETVNLSQKILKMSGSVICRIGFGINLEGSKLENTYQEIIVQAFEVLGSLAAVDYFPVIGTIIDRITGLHAKCEKVFHGIDSFFDQAIQRHIDDPSIKDDIIDLLLKMERGEGSLGEYELTREHTKGILMNILTAGIDTSAQTMTWAMTHLLANPRVMKKLQAEIREKIKNIDEITDDDVEQLDYFKLVLKETFRISPIVPVLVPRVAAKDLKIAGYDVPEKTWIHVNMWAVHMSPSIWKDPETFNPERFIDNQTDFKGLNFELLPFGSGRRMCPGMGMGLAVVHLTLINLLYRFDWKLPNGMKAEELSIEENYGLICVKKLPLEAIPVLTQWT

SEQ ID NO: 11201 - protein, 370 aa, Lycopersicon esculentum
MSCFSCCDDDDMHRATDNGPFMAHNSAGNNGGQRATESAQRETQTVNIQPIAVPSIAVDELKDITDNFGSKALIGEGSYGRVYHGVLKSGRAAAIKKLDSSKQPDREFLAQVSMVSRLKDENVVELLGYCVDGGFRVLAYEYAPNGSLHDILHGRKGVKGAQPGPVLSWAQRVKIAVGAAKGLEYLHEKAQPHIIHRDIKSSNILLFDDDVAKIADFDLSNQAPDMAARLHSTRVLGTFGYHAPEYAMTGQLSSKSDVYSFGVVLLELLTGRKPVDHTLPRGNRVCYLGNARLSEDKVKQCVDARLNTDYPPKAIAKMAAVAALCVQYEADFRPNMSIVVKLFSLCCLDLYQVRHQACEFSPYPCLYVMK

SEQ ID NO: 11202 - protein, 467 aa, Caulobacter crescentus CB15
MNAPIRNHDVAELKRLDLAHHLPAQADHKVIAELGGSRIVTRADGCYITDGDGHRILDGMAGLWCVNVGYGRKELADAAYEQMLELPYYNTFFKTATPPTVKLAAKIAEKMGGHLTHVFFNSSGSEANDTVFRLVRHYWKLKGQPNRTVFISRWNAYHGSTVAGVSLGGMKHMHVQGDLPIPGVEHVMQPYPFGEGFGEDPAAFRDRAVKEIEDKILEVGPENVAAFIGEPVQGAGGVIIPPDGYWPAVEAVCRKYGILLVCDEVICGFGRLGQWFGHQHYGIKPDLIAMAKGLSSGYLPISAVGVADHIVAELREKGGDFIHGFTYSGHPTCAAVALKNIEIIEREDLITRTREDTGPYLAKALARLNDHPLVGETRSLGLIGAVEIVREKGTNHRFLDKEGEAGPIVRDICIRNGLMVRAIRDSIVCCPPLIVSHAEIDELVGIIEKSLTEAEPILRALKPEAVS

SEQ ID NO: 11203 - protein, 470 aa, Oryza sativa (japonica cultivar-group)
MALQTLNPRHVLPLPLPRRRAPRPRVLHRPPPPRRRLEGAARPRAVAVAVNEARRRWPPAEGGGEEGKETDLATLGNLCVDVVLSVPQLPPAPREEREAYMERLAASPPDQKFWEAGGNCNLAFAAARLGLRCSTLGHVGEEIYGKFLLDVLEEEGISVVGMLDNSDSGACRNAYETLLCWVLVDPFQRHGFCSRADFSDEPAFSWIRKLPAETKTAIHHSKILFCNGYAFDELFPDVISSAIDCAIDAGTAVFFDPGPRGKSLLHGTLDEQRALEHSLRLSDVLLLTSDEAESLTNIRNPIQAGQELLKRGIRTKWVVIKMGSKGSIMVTKSAVSSAPSFKIDVVDTVGCGDSFTAAIAFGFLHNLPAVSTLTLANAVGAATATGCGAGRNVAHLDKVLQLLRESNINEDDTPWSELIEASSFCSEVSVLSKTAVNSFSDRLVHVPTCNVVSNLLSMLEAVSERSTVQA

SEQ ID NO: 11204 - protein, 374 aa, Crossopetalum rhacoma
ALSIAGAVQSQKLAVRAISQLQSLPGGDIKLLCDTVVESVRHLTGYDRVMVYKFHEDEHGEVVAERKRPDLEPYIGPHYPATDIPQASRFLFKQNRVRTIVDCHASPVRVIQDDGLMQPLCLVGSTLRAPHGCHAQYMENMGSIASLAMAVIINGNDEEVIGGRNTTRLWGLVVCHHTSARCIPFPLRYACEFLMQAFGLQLDMELQWRAQLSKKHVWKTRTLLCDMVLRDSPTGIVTQSPSIMDLVKCDGAALYYQGNYYPLGVTPTEAQITDIVGWLLDFHGDSTGLSTDSLADAGYPGAALLGDAVCGMAVAYITNRDFLFWFRSHTAKEIKWGGAKHHPEDRDDGQRMHPRSSFQAFLEVVKSRSLPWEN

SEQ ID NO: 11205 - protein, 345 aa, Glycine max
MGLSSLHVCMDSSDHWLQGTIHEESGMDSSSSPSGDMLTCSRPMIERRLRPPHDQALKCPRCDSTHTKFCYYNNYSLSQPRYFCKTCRRYWTKGGTLRNIPVGGGCRKNKKVSAKKSNDHQLVNNNNINQTRPPHHHHPKDLQLSSFPDVQFSHLSNLLGTNANPSFMEGKYGIGMIENPRPIDFMMESKLEGIIGSGSSSRNNFDFFGNNDMSMGMASVGLGDMNGATTHQNGLPPNLYHHGLSAFGGMSMSLDHGNNNNSDNNGANRYLMDSCQRLMLPYDVSNEDHNAQIDVKPNPKQLLSLEWQDQGCSDAGKDSFGYLNGPGSWTGMMNGYGSSTTHPLV

SEQ ID NO: 11206 - protein, 446 aa, Methanosarcina mazei Goe1
MKAVVYRGPNQVSVEEVEDPKIEHPADAIIRLTSSGICGSDLHMYEGRTVEKPGKVLGHEPLGVIEEVGDAVTSFKKGDRVVVTFNIACGHCLNCIRGFTSACLTVNPESAGGAFGYAKMGPYRGAQAEFLRVPFADLNCTKLPGSPGDKWEDDFIMLSDVFPTGFFATQLAMVMPGFPVAVFGAGPVGLLSAYSAILQGAAQVFVVDYIPERLKLAKSIGAIPVDFTLSDPVAMIEALRSQHSRVDTVLPGEEKLQGIMSSIENLAKSIGANLELARSDPVTMIQMLRAGNPAIVQSLIPGEEKMKGVMSGIDAVGYQARDRQDPSRENPTQVISDLVRLINPTGHLGVIGVYVADDPGAYNERAKKGEYILPFGQLWEKGISVGTGQTPVKKLQPMLRDMIIAGVAKPSFIVSHKISIEEAPDAYREFAKRSEGFTKVTIQFEK

SEQ ID NO: 11207 - protein, 400 aa, Oryza sativa (japonica cultivar-group)
MGMGRRAAALALVSLLALGVVAAEARRLDKDGLGGGGGFGGGGGVGHGGGVGIGFGGGKGGGVGVGGGGGFGGGAGGGLGHGGGIGGGFGGGKGGGLGGGVGVGGGIGHGGGVGGGFGGGKGGGLGGGGGLGGGGGGGAGGGLGGGAGGGAGAGVGGGAGAGGGAGGGGGLGGGAGGGAGGGLGGGSGGGGGLGGGAGGGAGVGGGAGGGAGGGGGLGGGAGGGAGGGGGLGGGAGGGHGGGGGLGGGAGGGAGVGGGAGGGAGAGGGLGAGGGAGGGGGIGGGAGGGAGAGGGFGGGKGGGFGGGGGGGGGAGAGGGFGGGKGGGFGGGFGGGKGGGVGGGAGGGFGGGGGAGAGGGFGGGKGGGFGGGVGGGHGAGGGGAGGGGGFGGGAGGGIGGGQ

SEQ ID NO: 11208 - protein, 581 aa, Zea mays subsp. mays
MKREYQDAGGSGGDMGSSKDKMMAAAAVAGEQEEEDVDELLAALGYKVRSSDMADVAQKLEQLEMAMGMGGVGGAGATADDGFVSHLATDTVHYNPSDLSSWVESMLSELNAPPAPLPPATPAPRLASTSSTVTSGAAAGAGYFDLPPAVDSSSSTYALKPIPSPVAAPSADPSTDSAREPKRMRTGGGSTSSSSSSSSSMDGGRTRSSVVEAAPPATQASAAANGPAVPVVVVDTQEAGIRLVHALLACAEAVQQENFSAAEALVKQIPMLASSQGGAMRKVAAYFGEALARRVYRFRPPPDSSLLDAAFADLLHAHFYESCPYLKFAHFTANQAILEAFAGCRRVHVVDFGIKQGMQWPALLQALALRPGGPPSFRLTGVGPPQPDETDALQQVGWKLAQFAHTIRVDFQYRGLVAATLADLEPFMLQPEGDDTDDEPEVIAVNSVFELHRLLAQPGALEKVLGTVRAVRPRIVTVVEQEANHNSGTFLDRFTESLHYYSTMFDSLEGAGAGSGQSTDASPAAAGGTDQVMSEVYLGRQICNVVACEGAERTERHETLGQWRSRLGGSGFAPVHLGSNA

SEQ ID NO: 11209 - protein, 371 aa, Acinetobacter calcoaceticus
MSELKDIIAAVTPCKGADFELQALKIRQPQGDEVLVKVVATGMCHTDLIVRDQYYPVPLPAVLGHEGSGIIEAIGPNVTELQVGDHVVLSYGYCGKCTQCNTGNPAYCSEFFGRNFSGADSEGNHALCTHDQGVVNDHFFAQSSFATYALSRENNTVKVTKDVPIELLGPLGCGIQTGAGACINALKVTPASSLVTWGAGAVGLSALLAAKVCGASIIIAVDIVESRLELAKQLGATHVINSKTQDPVAAIKEITDGGVNFALESTGRPEILKQGVDALGILGKIAVVGAPQLGTTAQFDVNDLLLGGKTILGVVEGSGSPKKFIPELVRLYQQGKFPFDQLVKFYAFDEINQAAIDSHKGITLKPIIKIA

SEQ ID NO: 11210 - protein, 299 aa, Pyrobaculum aerophilum str. IM2
MIVAVHGGAGLWRVEERIKQEVKKALAAAISEGLLAAERGSALDAVVAAVEYMEKSGLFNAGYGSVYAIDGRVYMDAGVMDGRSKRAGAVAAVEGVKSAVRLARYVLENTDHVIISGEGARLLAAKTGLLEASYKFYTEEKNKRFQEVVQEARRGNWHYKRVAEFFGDTVGAVALDRDGNLAAATSTGGVWLKWPGRIGDSPIPGAGFWAENGVGAFSATGVGEVIIMSALSLRARDELIKTGDIGVAVEKAIGFVTESYGPNTAGIIGIDSKGRPAYAYNTKAMARGWGKRGEIYVDL

SEQ ID NO: 11211 - protein, 324 aa, Triticum aestivum
  unsure (1)..(324): unsure at all Xaa locations
MGVKGFVEGGIASIVAGCSTHPLDLIKVRMQLQGESSAAXAAPQPALRPALAFQAGAHTVTLPHAPTPVPKPGPIGICTQILRAEGAAGLFSAISATMLRQTLYSTARMGLYDILKNRSTQENGGVLPLHLKIAAGLIAGGVGAAVGNPADLAMVRMQADGRLPLAGRRNYRSVGAAIARMTRDEGVRSLWRGSALTVNRAMIVTASQLATYDQAKEAILARRGPAADGLGTHVAASFAAGIVAAAASNPVDVVKTRVMNMKVAPGAPPPYAGALDCALKTVRSEGVMALYKGFIPTVSRQGPFTVVLFVTLEQVRKVFKDAEF

SEQ ID NO: 11212 - protein, 394 aa, Oryza sativa
MPPKASKKDAAPAERPILGRFSSHLKIGIVGLPNVGKSTFFNIVTKLSIPAENFPFCTIDPNEARVYVPDERFDWLCQLYKPKSEVSAYLEINDIAGLVRGAHAGEGLGNAFLSHIRAVDGIFHVLRAFEDKEVTHIDDSVDPVRDLETIGEELRLKDIEFVQNKIDDLEKSMKRSNDKQLKLEHELCEKVKAHLEDGKDVRFGDWKSADIEILNTFQLLTAKPVVYLVNMSEKDYQRKKNKFLPKIHAWVQEHGGETIIPFSCAFERLLADMPPDEAAKYCAENQIASVIPKIIKTGFAAIHLIYFFTAGPDEVKCWQIRRQTKAPQAAGTIHTDFERGFICAEVMKFDDLKELGSESAVKAAGKYRQEGKTYVVQDGDIIFFKFNVSGGGKK

SEQ ID NO: 11213 - protein, 469 aa, Burkholderia pseudomallei
MQTESNGRPGAGGGAARPALQQTLGTWQLWGIAVGLVISGEYFGWSYGWASAGTLGFVVTALFVAAMYTTFIFSFTELTTSIPHAGGPFAYARRAFGPAGGYLAGVATLVEFVFAPPAIALAIGAYLHVQFSGLEPKHAAMGAYLVFMALNIVGVQIAATFELVVTLLAIFELLVFMGVVSPGFAWSNFVKGGWAGADHFSAGAFHGMFAAIPFAIWFFLAIEGVAMAAEEAKHPKRSIPIAYVAGILTLVALAIGVMVFAGGAGDWTKLANINDPLPQAMKYIVGANSGWMHMLVWLGLFGLVASFHGIILGYSRQIFALAREGYLPEWLAKVHPRFKTPYRAILAGGVVGIAAIYSDELIQFGGQTLTANIVTMSVFGAIVMYIVSMAALFKLRRVQPRMERPFRAPLYPFFPAFALVAALVCLGTMVYFNALVASIFVAFVALGYGYFLATRAQREAAPADALLEE

SEQ ID NO: 11214 - protein, 894 aa, Cytophaga hutchinsonii
MMPKTHYNIYHPPGLYSQAPDFNPGIPGLTNLLCFQQCGKNGIIIQRNQYLEAYFPIHQFYSSMTKVFSIILLCSAFISSSVSVYAQFNRSDTRRSVPYTANYQRMATGNNSDHSFEIRSGELWGWGYNSNGQLGDGTTMDRRTPVKIGIDINWVAVATGSSYTLALKADGTLWSWGKNQRGQLGDGTTIDRHSPVQIGTEQTWTGIAACFSSGIGIKANGTLWTWGFNNGGELGIGNNDEKHTPVQVGADQNWLYAVAGSNHIVALKVDGSLWGWGLNEAGEIGNGNTVQQDSPVRVGTDNDWTTLAAGSNHTLAIKSNGTLWAWGHNVRGNLGNGTATLDPATLPVQVGTDADWIRVSAGLDHSVALKANGTLWAWGYNVRGQLGYGSGTDKHLPVQIGTAHTWVAINAGTYHTIGVKADGSLWTWGDNTNAQLGDGGTADQPVPHSIRTAPDDWISIAASNAFSMGLKANGTIWTWGLNPFETDGQYKNSSPVQTGSDQNWKSIATGSNYILALKADGTLWAWGDNFSGQLGDGTEQPRMLPKQIGTATTWVSIAAASGVQSFGIQADGSLWSWGHNYDGELGLGTNLKTLVPTRVGTGTDWISIKTGVGHTLGIKSDGTLWGWGTNRQGQLGDGTLVNKYVPVQLGTDRDWINIAGGTIHNICLKSNGTLWAWGRNNYGQVGTGNLITQDRMVQISAEQNWIDVYASLDQSFAIRADGSLWACGLNSSGQLGDGTSVDRAAMVAVGTNQKWISLAAGNYHTLALPVNRIQYCGTGTAYYGELGDHVFDNPNKTAFDCLDNNITTPINIQDNNHAPVLLVYPNPSAGSCTIIGNRDAMYIITNELGQMIRSVSLTENNQYAVTIEGLNTGMYFVTGINNPHAGNLKFIVLQ

SEQ ID NO: 11215 - protein, 900 aa, Gnetum gnemon
ASQSTVAAESHSKSKSVGDRMPLYDASMIPGSEMFNFSAEAELLSFQSKNLSSQQSASSEDAVSCRPVAAGPFTSFGHTVSKDSVVSNVTSWKNYSAQGSEEWPGRVILNSVGYEGGQDSLATPLMLGGSVKEVAAQADAMRLYLMNPGYDAYSEASTAAHSSNNIANQIHDVHKQIVEVPAHFQSYIQNHAVSVVGETSHSSGSQWVSGTNELALLPSYSDIQNGHYLPSSRYYGIGSWANRHNALQDSYQGAFVEGKVGVEVRPQQLSIGRDGCGPSGQGLSLSLSPHQPSEVPLHQIDAVCNRTNILQLSADQLKGKSEDVQSRNEGAHGPQGHPSPYSRRVLSRVGAPMDLQMNVGPLGPFTGYATILKGSKYLKPAQQLLEEFCNVGKGLNYQCNPSKQKLLGHHLSAEKSLPDAVIPPISTTVKGEVDGRKASACAASSSMSVVDKTSSEPAMGEQLVISGARFEMHKKRTRLLALLDELQRRYRQYNDQMQMIITSFESVGGLGAAAPYTSLALKAMSRHFKCLKDAIGDQLKVISKALGNESSLPGVSVGETPRLRLVDQGIRNQRSVHHLGMLEQHAWRPQRGLPERAVSVLRAWLFEHFLHPYPTDADKHMLARQTGLSRSQVSNWFINARVGLWKPMVEEMYELETREASQVDAPPGKTDREERDTSKGGISTEKNASGRGKVLMETISEMQSVSGCGSSSKLEQTTSTSQNGHENCGTSVSIPLESSYLHAHEADAARETAVNVNRHFSGQTQGMPTSHSAISGVESDSGYADSSGFSYEQATKRLRQGLGNTIDFSSYMGGRISHESLNPRPTGNASVSLTLGLRHSGAQEKYTGALYLPREDTLQGCNSRYEIHEIHDGHNQACVGGFETHDIQFRKHLIGTQLLQ

SEQ ID NO: 11216 - protein, 458 aa, Shigella flexneri 2a str. 301
MMESKNKLKRGLSTRHIRFMALGSAIGTGLFYGSADAIKMAGPSVLLAYIIGGIAAYIIMRALGEMSVHNPAASSFSRYAQENLGPLAGYITGWTYCFEILIVAIADVTAFGIYMGVLFPTVPHWIWVLSVVLIICAVNLMSVKVFGELEFWFSFFKVATIIIMIVAGFGIIIWGIGNGGQPTGIHNLWSNGGFFSNGWLGMVMSLQMVMFAYGGIEIIGITAGEAKDPEKSIPRAINSVPMRILVFYVGTLFVIMSIYPWNQVGTAGSPFVLTFQHMGITFAASILNFVVLTASLSAINSDVFGVGRMLHGMAEQGSAPKIFSKTSRRGIPWVTVLVMTTALLFAVYLNYIMPENVFLVIASLATFATVWVWIMILLSQIAFRRRLPPEEVKALKFKVPGGVATTIGGLIFLLFIIGLIGYHPDTRISLYVGFAWIVVLLIGWMFKRRHDRQLAENQ

SEQ ID NO: 11217 - protein, 259 aa, Wigglesworthia glossinidia endosymbiont of Glossina brevipalpis
MKPFFWRIIGSGSVNLVFIHGWGLNSCIWNNIIIILSNYFKLHLVDLPGYGKNILYKEYSFSKITEIIACKSPKKSILIGWSLGGLIATNISIVYPEKFKGLIIVSSSPCFCEKKDWPGIKKEILNNFSFQLKNDFHNTVKKFFNIQFLGTKKNNNEIKKLKNIFFRQKEPSYKTLSSGLKILKNIDIRNYLKYIKIPTLRIYGNLDVIVPVKIIPIIKKLQNFNINKNIIIPSASHAPFLSHPFLFCKIIKYFIKKFN

SEQ ID NO: 11218 - protein, 349 aa, Chenopodium rubrum
SKTHFKMTTLETEQEQQPFSQNSPLFLDCLYCEEKYWDYDYHDEDDFGSLNSSKLHDCSLICCEDDEEIQLNALVSKEEKINFDEGDLGGNQLVMETRREALEWMIRVNYHHNFSVITLVLGVNYFDRFMLSFGFQKEMPWMTHLAAVACLSLASKVEETHVPLLLDFQVEHEQIFEAKVVQRMELLVLQHSNGKMNAVTPLSYFGHLIRKLKLKPHFHCKILTRCENIIVSVILDPRFLCYVPSVLAAASMVQTLKEIGLWSILEHQNDIMNTLKLDKVKVEDCYNFIQEVSSNEKARKRKWYNNISSANRNPNNVLELVVSSESSNNDLPSETLPKKCRTMGPPCFG

SEQ ID NO: 11219 - protein, 884 aa, Oryza sativa (japonica cultivar-group)
MWTLHVILSLFFLPLFPFSLSTSAFCKRRWRQRQRRRRWREGRRWRHWSGGGDGRGPEWRRRFGLELAWMEAEAATEEMAGGRGPERRRVGGEPGGRWWLAGRELVAKAAPIFLPPRRAPHAPAPIGGADYAVGSVPRAAKGGRLGLRGGLTDGDAGLAEEGCGRRATITAEESAVANRTAAGTRLAISTSSNFHKAASAKKKRRSQKKTTRETTQLQESLGSSLSPFWVVSVILQELSCSSSLLGLKVDFCTGTAKALGIVLQKAQQSEAYCPSLSLLLLLKTMATFFSSSTNQRDLTGGGGDGGDMSFQHYPPPSNPYSDSSAGGLIPLPASIVSHSHIAHGGGDEPAAFREAATADGGEMGLQTQLLMAHGAAARGHQGGLSLSLGTQVPVSLYQYRPAGMAAASLLSPSQSSPMAGRSAQNSIYVQNSRFLRAARELLDEVVNVRDAIKRKGDKNQGKDSGECKGGDAAGDDKAGSNPQEQESNSAPELSPSERQDLQNKVTALMAMLDQVDRRYRHYHHQMQIVMSSFDAVAGGGAARPYTALALQTISRHFRSLRDAIGAQAQAARRGLGEQDASAQGGGGLSRLRYIDQQLRQQRAMQQFGMMQQPQHAWRPQRGLPESAVSVLRAWLFEHFLHPYPKDSEKLMLARQTGLSRGQVSNWFINARVRLWKPMIEEMYKEEFGAEMDSNSSSENGGGGGGKGKDEAISSEDRDEFQSPSSAAAARHAGVAGQLNNPFKSEAMGGAALDVGVGVVGLSSCLGGAMGTYATGLNLNHHVHHPGAGGTSLLHDALHHHHHGGGGDARFVSYGDMADLGGGGGYDGGSVSLTLGLQHCNNAGPVPAEQQGLLYGSAGDFDYINGSDDRQRFGPASQLLHDFVA

SEQ ID NO: 11220 - protein, 382 aa, Sorghum halepense
EPARTEDPALSIAGAVQSQKLAVRAISRLQALPGGDIKLLCDTVVEHVRELTGYDRVMVYRFHEDEHGEVVAESRRDNLEPYLGLHYPATDIPQASRFLFRQNRVRMIADCHATPVRVIQDPGMSQPLCLVGSTLRAPHGCHAQYMANMGSIASLVMAVIISSGGDDEQTGRGGISSAMKLWGLVVCHHTSPRCIPFPLRYACEFLMQAFGLQLNMELQLAHQLSEKHILRTQTLLCDMLLRDSPTGIVTQSPSIMDLVKCDGAALYYHGKYYPLGVTPTESQIKDIIEWLTVCHGDSTGLSTDSLADAGYLGAAALGDAVCGMAVAYITPSDYLFWFRSHTAKEIKWGGAKHHPEDKDDGQRMHPRSSFKAFLEVVKSRSL

SEQ ID NO: 11221 - protein, 744 aa, Listeria monocytogenes
MKTVLGKTNVTDTVSQTDLDQVTTLQADRLGIKSIDGLEYLNNLTQINFSNNQLTDITPLKDLTKLVDILMNNNQIADITPLANLTNLTGLTLFNNQITDIDPLKNLTNLNRLELSSNTISDISALSGLTNLQQLSFGNQVTDLKPLANLTTLERLDISSNKVSDISVLAKLTNLESLIATNNQISDITPLGILTNLDELSLNGNQLKDIGTLASLTNLTDLDLANNQISNLAPLSGLTKLTELKLGANQISNISPLAGLTALTNLELNENQLEDISPISNLKNLTYLTLYFNNISDISPVSSLTKLQRLFFYNNKVSDVSSLANLTNINWLSAGHNQISDLTPLANLTRITQLGLNDQEWTNPPVNYKVNVSIPNTVKNVTGALIAPATISDGGSYAEPDITWNLPSYTNEVSYTFNQSVTIGKGTTTFSGTVTQPLKAIFNAKFHVDGKETTKEVEAGNLLTEPAKPVKEGYTFVGWFDAQTGGTKWNFSTDKMPTNDIDLYAQFSINSYTATFDNDGVTTSQTVDYQGLLQEPTAPTKEGYTFKGWYDAKTGGDKWDFATSKMPAKNITLYAQYSANSYTATFDVDGKTTTQAVDYQGLLKEPKTPTKAGYTFKGWYDEKTDGKKWDFATDKMPANDITLYAQFTKNPVAPPTTGGNTPPTTNNGGNTTPPSANIPGSNTSNTSTGNSASTTSTMNAYDPYNSKEASLPTTGDSDNALYLLIGLLAVGTAVALTKKARASK

SEQ ID NO: 11222 - protein, 183 aa, Xanthomonas axonopodis pv. citri str. 306
MSQTLYDIPVTRIDGQPTTLADYRGKVLLVVNVASKCGLTPQYEGLEALYRDKRAQGLEVLAFPANDFNGQEPGSEAEIAQFCQLTYDVTFPMFAKIAVAGDQAHPLYGALTSTHPHTTGEGPMREKLAGYGIAPNPAPGVVWNFEKFLIGRDGKIIDRFAPDIPADDARLRAAIDAALATRS

SEQ ID NO: 11223 - protein, 192 aa, Zea mays
MMRETYMDVLPPVDHIAASRSGGWFPGAVRLWTAAENKQFERALAGLDLCRPDWEKVARAIPGRTVREVVSHFKSLQVDVQQIESGLVPMPVYGAGAGSFTLQWDGCYGPADSRHNGYRFGNGGCGRRHHGRTPEQERKKGVPWTEEEHRLFLLGLKKYGKGDWRNISRNYVQTRTPTQVASHAQKYFIRLN

SEQ ID NO: 11224 - protein, 380 aa, Pseudomonas aeruginosa UCBPP-PA14
MTRRTAFFFDELCLWHAAGPHALTLPVGGWVQPPAAAGHAESPETKRRLKSLLDVSGLTARLQLRSAPPASDEDLLRVHPAHYLERFKALSDAGGGSLGQDAPIGPGSYEIARLSAGLAIAALDVVLAGEADNAYSLSRPPGHHCLPDQAMGFCFFANIAVAIEAAKARHGVERVAVLDWDVHHGNGTQAIYYRRDDVLSISLHQDGCFPPGYSGAEDIGEDRGRGFNLNVPLLPGGGHDAYMQAMQRIVLPALERFRPQLIVVASGFDANAVDPLARMQLHSDSFRAMTAMVRDAAERHADGRLVVVHEGGYSEAYVPFCGLAVIEELSGVRSAVRDPLRDFIELQQPNAAFRDFQRQRLEELAAQFGLCPAQPLQAAR

SEQ ID NO: 11225 - protein, 402 aa, Rhodobacter sphaeroides
MLTSRDTGPRTASHPAILGEAPSLRALCVCYRIFVRQTSRLSTLSIRPPAFVKDPHRPVSRARTVPDAAERLTGARQAVSPRATREEDPMPVPEALRGRLKAPVIAAPMFLTSGPDLVVETCNAGLLGTFPALNQRSTEGFRDWLQEIQGRLEPHAAPFGVNLIVHRSNPRLEADLAVCVAEKVPLVITSLGAVPELVAAVHGYGGLVFHDVVNARHARKAAEAGVDGIIAVAAGAGGHAGTLSPFALVSEIRSFFAGTIVLSGAMNTGRDVAAARMMGADFAYLGTRFLATEEAQVSEAQKRMVAESAAADIVYTPKVSGVPASFLRQSLAAAGIDPEGGAAPHLDMASEAKVWRDVWSAGQGVGGISDIPKAAELCRRLIADYREAVSGAAEEARGEGWL

SEQ ID NO: 11226 - protein, 104 aa, Triticum aestivum
MANKLLHFLFYCSKEARKQLAEERPGVNNATLSALISVKWKDLSGAEKKVWSEKAAQGMAAYKREMEEYTKERASGPRAGGVPAGGGRVQPRWPQGHLLARGDR

SEQ ID NO: 11227 - protein, 339 aa, Streptococcus gordonii
MKHKILVTGGAGYIGTHTVVELIKAGHELVVVDNFSNSSKKSLEAVEKIVGQSITLYEADICDKEALLKVFKDFKPTGVIHFAGLKAVGESSQIPLTYYENNVAGTLTLLRVMEEVNCKNIIFSSSATVYGDPLTVPILEDFPVSATNPYGRTKLMAEEIMTDIYKADSTWNIVLLRYFNPIGAHESGDLGENPNGIPNNLLPYVTQVAVGRLEQVQVFGNDYPTVDGTGVRDYIHVVDLAKGHVAALKKFDGKQGLNIYNLGTGKGYSVLEIIHSMEKAVGKLIPYKIVERRPGDIATSYANPAKAKAELGWEAQFDISRMCQDAWRWQSKHPNGFDE

SEQ ID NO: 11228 - protein, 338 aa, Yersinia pestis CO92
MYVLVTGGSGYIGSHTCVQLIEAGYKPVILDNLCNSKSSVLARIHSLTGYTPELYAGDIRDRTLLDSIFAAHPIHAVIHFAGLKAVGESVNRPLEYYNNNVFGTLVLLEAMRAAQVKNLIFSSSATVYGDQPQIPYVESFPTGSPSSPYGRSKLMVEQILQDVQLADPQWNMTILRYFNPVGAHPSGLMGEDPQGIPNNLMPFIAQVAVGRRESLAIFGNGYPTPDGTGVRDYIHVVDLADGHVAAMKTLHGKPGVHIFNLGAGVGHSVLQVVAAFSKACGKPLAYHFAPRREGDLPAYWADATKAAEQLGWRVSRSLDEMAADTWHWQSKNPQGYPD

SEQ ID NO: 11229 - protein, 335 aa, Glycine max
  unsure (1)..(335): unsure at all Xaa locations
ETTAGPSTNDEYKQHQSAASSQRTIKGSTLLQFRRDASIMNMTPYSRFSLEPIPWRQPEASQGSQLQNSKRSESSAKASKLSLSVYGEIEKRIADLEFXXSGKDLRALKQILDAMQRYKESLDIPRDQVSNSLSDNRSNSSLSESSIXXXPRLRQKDPTSTTVEMSNSTQGSKSPIFIMKPAKAAXXXNSPASTEMSFQGKSGPSKFSPANRTNGIMGDKLDRQTAKVRQVINGENATNSSNTAEAKSPRLQKKFGLERRSPPTSPSSDLSSNRRQQNRQSVELSSPSTTPRQKFSEISNQRRDFKHEVDLEVIHIDHSDRINGNTIQLKGINQN

SEQ ID NO: 11230 - protein, 394 aa, SYNECHOCOCCUS SP. WH 8102
MMNTYNRFPLTLVRGRGCWVWDDQGRRHLDAVAGIATDTLGHSDRALRRSLGRQLRRLQHVSNLYRIPEQDALATWLVQHSCADSVFFCNSGAEANEAAIKLARKHGHLKRGIDRPRILTASASFHGRTLAAVSATGQPRYHQGFEPMVEGFDYFPYNDIHAFESLLERHEANGPAVAAVLLEPLQGEGGVHPGDAGFFQRLRHLCSERNILLILDEVQVGMGRSGRLWGYEQLGIEPDAFTLAKGLGGGHAIGALLVNAKADVFEPGDHASTFGGNPFACTAGLTVAQEIQRRGLLRNVEERGQQLQQGIQGLVARYPQLLQGVRGWGLLQGLVLHQDCGVTAPQLAKAAIEQRLLLVAAGATVLRMVPPLVISANEVRQLLRRLDATLAELV

SEQ ID NO: 11231 - protein, 354 aa, Zea mays
MSWRRNQLRAFLVLAVILLITAATYRANAQPAPPADPTPAADTCADPSVEGACRNVPKALRLKLIAIPTILVSSVIGVCLPLLSRSVPALRPDRNLFVIVKAFASGVILATGYMHVLPDSFSNLTSPCLPRKPFYNRRKGGNTSGRRTSGAVADHESPAHEHHWHSHGHGHGHGHAGGIVVADKPEDDEASQVQLRRNRVVVQVLEMGIVVHSVVIGLGMGASQNVCTIRPLVTAMCFHQLFEGMGLGGCILQAEYGAKMKAGLVFFFSTTTPFGIALGLALTKVYRENSPTALIVVGLLNAASAGLLHYMALVELLAADFMGPKLQSSVRLQLLCFLAVLLGAGGMSIMAKWA

SEQ ID NO: 11232 - protein, 207 aa, Triticum aestivum
  unsure (1)..(207): unsure at all Xaa locations
MVSLKVPKRLAASVLKCGKGKVWLDPNEVSEISMANSRQNIRKLVKDGFIIKKPQKIHSRSRARRAHEAKQKGRHSGYGKRRGTKEARLPTKVLWMRRMRVLRRLLRKYREAKKIDKHMYHDMYMKVKGNSFKNKRVLMESIHKSKAEKAREKTLSDQFEAKRAKTKASRERKIARGKECPHLAPXDPPAPVAAPAPSTGVPKKAKK

SEQ ID NO: 11233 - protein, 210 aa, Papaver somniferum
MSIIPSFFSNQRSNVFDPFSLDIWDPFQGFPFSTGALTANWQGGSDTARETSQLANTRIDWKETPEAHVFRADLPGVTKEEVKVEVEEGRVLQISGERRSRESEEKNDKWHRVERSSGKFLRRFRLPENTKMDEVKATMENGVLTVCVPKVEQRRPEVKSIEISGASEGSTQVPMETPVLRLHKTRLLRDVAMTGNLQASYVVSCLVLFS

SEQ ID NO: 11234 - protein, 158 aa, Zea mays
  unsure (1)..(158): unsure at all Xaa locations
MAKGGLSKLKCMLKRWHSSSRISRTPSGCSARSSHDVGDAGAGFALENSWRKGVAASSVFAFGGGGTGSASFHGADGVPPGLHPVYVGKSRRRYLIAADLVGHPLFQNLLDRSGGXAPAPAGPVVGCEVVLFEHLLWMLENADPQRESLDELVEYYAC

SEQ ID NO: 11235 - protein, 79 aa, Glycine max
  unsure (1)..(79): unsure at all Xaa locations
IPAXXXXXXGLILVXGWLXTXWXXGXTAIAVRXAVKXXLVXXEPMGKPXPFSSLEVWTWXXCXPXIICICIXYPTALGT

SEQ ID NO: 11236 - protein, 360 aa, Bifidobacterium longum DJO10A
MARWRSNESRHREPMMRNAEPVAAINGYHTCGSNDTLASAHPSDFRKGHDMTTSSVSPVTTELAGSETGITLIIHAGAGSRGKHSTPERIAQVELDLQRALDAGYQLLESGAPAHEAVVAAIHVMEDAPEFNAGRGAALTSDGIAQMDACLMTGDGEVGAVTGVSTVKNPIDAARAVKEQTKHVLFADPTDAEIADWGVATESNEYFITEQRRQSLAEAQSGGDEWEKHGTIGAVARDAEGNIAAGTSTGGITNQMHGRVGDSPLPGCGTFANQSTVAVSCTGIGEAFIKVVAAHQVSDRVRFAGENVEDAATATLDEVAAHHGDGGMIVLPAVGRGVVAYNSEMMNFGYRSAQGGKVQG

SEQ ID NO: 11237 - protein, 495 aa, Catharanthus roseus
LLFCFILSKTTKKFGQNSQYSNHDELPPGPPQIPILGNAHQLSGGHTHHILRDLAKKYGPLMHLKIGEVSTIVASSPQIAEEIFRTHDILFADRPSNLESFKIVSYDFSDMVVSPYGNYWRQLRKISMMELLSQKSVQSFRSIREEEVLNFIKSIGSKEGTRINLSKEISLLIYGITTRAAFGEKNKNTEEFIRLLDQLTKAVAEPNIADMFPSLKFLQLISTSKYKIEKIHKQFDVIVETILKGHKEKINKPLSQENGEKKEDLVDVLLNIQRRNDFEAPLGDKNIKAIIFNIFSAGTETSSTTVDWAMCEMIKNPTVMKKAQEEVRKVFNEEGNVDETKLHQLKYLQAVIKETLRLHPPVPLLLPRECREQCKIKGYTIPSKSRVIVNAWAIGRDPNYWIEPEKFNPDRFLESKVDFKGNSFEYLPFGGGRRICPGITFALANIELPLAQLLFHFDWQSNTEKLNMKESRGVTVRREDDLYLTPVNFSSSSPA

SEQ ID NO: 11238 - protein, 428 aa, Brassica rapa
DNSYTLSFLLVFFVLILFRPAFSINTLSSTESLAISSNRTLVSPGNVFELGFFRTNSSSRWYLGIWYKTVPERTYVWVANRDNPLSSSTGTLKIFNMNLVLLDHSNKSVWSTNITRGNERSPVVAELLPNGNFVIRYFNNNDASGFLWQSFDYPTDTLLPEMKLGYDLKKGLNRFLTSWRSSDDPSSGEFSYKLEPRKLPEFYLFTEDIPVHRSGPWNGIRFSGIPEDQKSSYMVYNFTENSEEVAYAFRMTNNSIYSRLTLSSEGYLQRLTWTPSSLVWNLFWSSPVNLQCDVYKACGPYSYCDENTSPVCNCIQGFNPRNMQQWDLRDPSGGCIRKTRPRCSGDGFTRMKNMKLPETTMAIVDHSIGVTECKKRCLSDCNCTAFANADIRNGGTGCVIWTGRLDDMRNYVADGQDLYVRLAAADLV

SEQ ID NO: 11239 - protein, 415 aa, Zea mays
MASRGSPSSYSSPRTPTSSKANPWPAPSAPPLYPTLSMADLAPVEIGPASSPTASDDYNAPPPSEDVLLRVPGARLHLVDRSRSHPLAAGDLSLLRIRSGDTSLAAIALLGPVQWPLARDVAAVKLDPCHYAFSLTVPASADDPSPDPLHYGLTLSRPDVRLDGVLAAYTSFSVHAVVGAGQLEARVRDEAEAAAYWTAVAPNVEAYGGAVARTIATGAEHLAKGILWCGEVTVERLRWGNEVLKRRMQPGDANAEVSPEMLRRIKRAKRVSQISEKVATGILSGVVKVTGYFTSSLANSKAGKKFFNMLPGEIVLASLDGFGKICDAVEVAGKNVLSTSSTVTTGLVSHRYGDKAAAATNEGLDAAGHAIGTAWAVFKIRQALNPKSVLKPTALATSTIRANVAELRAMHGSSK

SEQ ID NO: 11240 - protein, 375 aa, Aquifex aeolicus VF5
MKKVKLIGTLDYGKYRYPKNHPLKIPRVSLLLRFLDAMNLIDEKELIKSRPATKEELLLFHTEDYINTLMEAERCQCVPKGAREKYNIGGYENPVSYAMFTGSSLATGSTVQAIEEFLKGNVAFNPAGGMHHAFKSRANGFCYINDPAVGIEYLRKKGFKRILYIDLDAHHCDGVQEAFYDTDQVFVLSLHQSPEYAFPFEKGFLEEIGEGKGKGYNLNIPLPKGLNDNEFLFALEKSLEIVKEVFEPEVYLLQLGTDPLLEDYLSKFNLSNVAFLKAFNIVREVFGEGVYLGGGGYHPYALARAWTLIWCELSGREVPEKLNNKAKELLKSIDFEEFDDEVDRSYMLETLKDPWRGGEVRKEVKDTLEKAKASS

SEQ ID NO: 11241 - protein, 285 aa, Thermosynechococcus elongatus BP-1
MSPIIQWYPGHIAKAERALKEQLKQVDVIFEVRDARIPLASCHPQIRQWASGKQRLLVLNGMDRISDRDRQQWLTWFETQGETVFFTNAQRGEGIRRLEQAAVRAGAAINQRRQQRGMQVRAVRAVVLGFPNVGKSALINRLLQQRVVESAARPGVTRQLRWVRLSPVLELLDAPGVLPMNFKNQEAAVKLAICDDIGQAAYDPCRVAPMLVEIMQQLGYAERLRDRYGLALTDTGETYLYDLAARRYHGDLERAARQLLQDYRRGYLGAIALEHPPQSRNSTIP

SEQ ID NO: 11242 - protein, 391 aa, Ferroplasma acidarmanus
MYLIFWKLHIEKNYMLVSMVNLMYIEFTDSGMVVPDILTIGYIDGDGIGPEITGAMIGVVNSAIELAYQGSRSIEWHKILIGTEAYEKFGTYVPEDSIKEIQKMYIAMKSTLNFMPDKRDLNTILRKRLGLYSNIRILKYIEGMDIPVNTFNRLNLTIIRDSTPNSHIFYHSSESTDDLIRFISDNYGLNITPDSGIYMMPQSKFRTRKIAKQAVRYSRRNGKKKITILESQQNHEFANWCIEEASAQEDVGYEVLKTREFMKRLISSPEDFEVILVDNVLSQTLVDYLAGTINIEYGSSIGDECAVFEAVQSSLPSEAGYDAADPLSFILSGCEMLMHIGWVEAAQIIENAISAAFRDNKIPKDINTRPDISPIKCSEFSSEIIKRMNGV

SEQ ID NO: 11243 - protein, 107 aa, Acacia mangium x Acacia auriculiformis
FDKDGDGQITTKELGTVMRSLGQNPSESELQDMINEVDADNNGTIDFPEFLTMMARKMKDTDSEDEIREAFKVFDRDNNGFISAAELRHVMTSIGEKLTDDEVDEMI

SEQ ID NO: 11244 - protein, 415 aa, Lunaria annua
YPHSYTFFFFFMFVVLVLFRHVFSINTLSSTETLTISSNRTIVSPGDVFELGFFKTTTTSRDSDRWYLGIWYKSSSERIYVWVANRDNPLSNSIGTFKISYANLILLDQSDTPVWSTNLTKAVNSPVVAELLANGNLVLRDSKTKNKDLNRFLWQSFDFPVDTLLPEMKIGWDLKTGHNRFLSSWKSSDDPSSGDFSFKLETQVLPEFYLWNKESRVYRTGPWNGIWFNGIPKMQEWSYIVNSFIKNKDEVAYTFKVTNPIIHTRFTLSYNGLLQGITTINEPNMFWFLPEDKCDVYKRCGPYSYCDMETTPVCNCIRGFEPKNAKAWALGETFDGCVRKKRLSYGGYGFLLMKMMKLPETSKVIVDERIGLKECEDKCGKDCNCTGFANLDIRNGGSGCVVWTEELVDMRNYIA

SEQ ID NO: 11245 - protein, 215 aa, Brassica napus
  unsure (1)..(215): unsure at all Xaa locations
MTSFSTFSELLGSEHESPVTLGEEYCPKLAASCPKKPAGRKKFRETRHPVYRGVRLRNSGKWVCEVREPNKKSRIWLGTFLTAEIAARAHDVAAIALRGKSACLNFADSAWRLRIPETTCPKEIQKAAAEAAVAFKAEINNTTADHGIDVEETIVEAIFTEENNDGFYMDEEESMFGMPALLASXAEGMLLPPPSVQFGHTYDFDGDADVSLWSY

SEQ ID NO: 11246 - protein, 191 aa, Lycopersicon esculentum
AGINISGTNGEVMPGQWESQVGPSVGIEGGDHIWCARYLLERITEQAGVVLSLDPKPIEGDWNGAGCHTNYSTLSMRGEGGFEVIKKAILNLSLRHKEHISAYGEGNERRLTGKHETASIDQFSWGVANRGCSIRVGRDTEKEGKGYLEDRRPASNMDPIVVTGLLAETTILWEPTLEAEALAAQKISLKV

SEQ ID NO: 11247 - protein, 440 aa, Vibrio cholerae
MSECLFSERPYGMEYAKAQILCRWRKVNQLKKDISLGAGIAQLSTTLMGTGLFMVPAIAAGIAGVFSLWAWLLLFVAICPIALTFAQLGKRYPNAGGTAYFVRQAFNPRLERAVAWLFLSVIPVGVPAAVTLAASFLQALLPAPLANPLLTQTLTILLLVGVNLAGTKSSGRLQTLIALAIFSLVIAFWWRGEVTTQDLVMPALTQEGWVSIGAALAVMFWCFVGIEAFAHMGEEFRNPQRDFPLAILIGSFVAGLTYWACSVVVLKFSAFGTPQFDSGAIPWLSDQLFGTRWAIMISVIGFLACFASLNLYTQSLARMVWAQAREYRPESAIARVSIRGVPAHATLLVGVVLFASCFIGHLTGLDLEFFLKLANGIFVLVYLLAMLAAFKLLTGWSKHLAGLALVLCAGVFLCLGWSMLYALGVFVLLIRPWQVRVQTI

SEQ ID NO: 11248 - protein, 411 aa, Xylella fastidiosa Ann-1
MSAVSESVLSLSRYYLPVYRPCQVVLVRGQGSRVWDEQGRDYLDLAAGIAVCCLGHCDPDLVAALVEQAGRLWHTSNVFYSEPSLRLAQELVDVSRFAERVFLCSSGTEANEAAIKLVRKWAAAQGRLPEHRTIVTFRGSFHGRTLGAVTATAQPKYQEGYEPLPGGFRYVDFNHIEALEAAMVGGDVAAVMLEPIQGEGGVMPVVSGYLAQVRALCDRYGALLVLDEIQCGMGRTGALFAYWQEKVVPDIVTLAKGLGGGFPIGAMLAGPKVAEVMQFGAHGTTFGGNPMAAAVARVALRKLASVEIAANVQRQSVALRAGLEEISEAFGGVFTQVRGRGLMLGAVLAPLYAGQASAILEVAAEHGVLLLQAGPDVLRFVPALNVSDEELADGLVRLRAALGDYVSRFGG

SEQ ID NO: 11249 - protein, 329 aa, Fusobacterium nucleatum subsp. nucleatum ATCC 25586
MSILVCGGAGYIGSHVVKYLLEKNEDVVVVDSLITGHIDAVDEKAHLELGDLKDEEFLNRVFEKYQIDGVIDFAAFSLVGESVGEPLKYFENNFYGTLCLLKVMKNNNVDKIVFSSTAATYGEAENMPILETDRTEPTNPYGESKLAVEKMFKWCANAYGLKYTALRYFNVAGAYPSGEIGEAHTCETHLIPLILQVALGQREKISIYGDDYPTPDGTCIRDYIHVMDLADAHYLALNRLRNGGDSQIFNLGNGEGFSVKEVIEVTRKVTGYPIPAEVSPRRAGDPARLIASSKKAIDELKWKPKYDKLEQIIETAWNWHKNHPNGYED

SEQ ID NO: 11250 - protein, 152 aa, Zea mays; identical to SEQ ID NO: 11151

SEQ ID NO: 11251 - protein, 168 aa, Zea mays
EVGWLLLPHRFVFRFWFVGEREEMAASDVEYRCFVGGLAWATDDHSLNNAFSTYGEVLESKIILDRETQRSRGFGFVTFSTEDAMRSAIEGMNGKELDGRNITVNEAQSRGGRGGGGGGYGGGRRDGGGYGGGGGGYGGGRGGYGGGGGYGGANRGGGYGNNDGNWRN

SEQ ID NO: 11252 - protein, 383 aa, Triticum aestivum
  unsure (1)..(383): unsure at all Xaa locations
MGGEKENLDLSDLNSSLPAAAAALSAEDRVGLVNALKDKLQSLAGQHADVLESLSPNVRTRVEFLRGIQSQHDEIETKFFEERAALEAKYQKLYEPLYAKRYDIVNGVVEVDGVAKEPTSENAAEGGDSDAKGVPDFWLTALKTNDVLTEEIQERDEPVLKYLKDIKWSRIDDPKGFKLEFFFDTNPFFKNSVLTKSYHMVDEDDPILEKAIGTEIEWYPGKNVTQKILKKKPKKGSKNTKPITXKTEECESFFNFFSPPQVPDDDEDIDEEAADELQGQMEHDYDIGSTIRDKIIPHAVSWFTGEAVQAEDFDDMEDGDEDDDDEDDDDEEDDEEDEDEDEDDDEDEEELSKPTKKVAGKPKGPAKGGAQGNAEQPTECKQQ

SEQ ID NO: 11253 - protein, 499 aa, Leuconostoc mesenteroides subsp. mesenteroides ATCC 8293
  unsure (1)..(499): unsure at all Xaa locations
MKAAVWHGVKDVRVEDVELKPTKSNEVVVRVAYAGICGSDLHEYLEGPVFIPVDQPDELTGGQAPLTMGHEFSGVIEKVGPDVANFKVGDHVSINPTVTKGISSDDLDVYDGYSFIGLSTDGGFTSYVNVPEDNLYHLPEEFSLKLAATIEPTAVAVQAIKEADLRFGEKVVIFGAGPIGVLVAAAAKAAGATKIVAVDLSEIRLRKALEMGATDVINPSQVPDTVAAIKNIIPGGADASFEVAGVQPTFEQAIDATRPRGSVVIVSIFAKPISFNPMQLMNAGVKLTTTIAYSKETFQQTVALVSSGQINVEPVITDTISLDSIVSDGFESLTSDKSQAKXXXXXXXXXXXXXXXXXXXXXXXXXXXXXXXXXXXXXXXXXXXXXXXXXXXXXXXXXXXXXXXXXXXXXXXXXXXXXXXXXXXXXXXXXXXXXXXXXXXXXXXXXXXXXXXXXXXXXXXXXXXXXXXXXXXXXXLEHKAIISWHNGFYRCFITDCFCW

SEQ ID NO: 11254 - protein, 251 aa, Oryza sativa (japonica cultivar-group); identical to SEQ ID NO: 1368

SEQ ID NO: 11255 - protein, 365 aa, Leptospira interrogans serovar lai str. 56601
MKVKNKTNHSPKETLGSVREILSDETFANPAYKGVSYFLRDLFFFVIVMVLLWNVDSWYVLPFLWFFAGMIISALFVVGHDCAHEALFKSKFLQYWIGQIAMLPSLHAYNQWGYGHNRIHHGHTIKRQADFVWHPTTKEEYSEFRIFKKLMHRFFWSIWGGGFYYMIEIWFKGMVLFTAPLKEAKRDKLIMLSFAFISSGLVFYFGASSIPGVFDIGTGLWMFTKVCLIPFIAWNYFMGITVYVHHIHSEIPWKTKEEWTPFYGQMKGTVNYHINPIMNFFFHNIFIHMPHHVHMKIPFYNLKRALNEIKVIYGDYVLERNTILGDYLKSTSLCKVIDSDTGKWMTYREAEEMSLKEKDLESIPV

SEQ ID NO: 11256 - protein, 172 aa, Triticum aestivum
MAEETGATAASGPAAGGEGKMTMVVGVDESEHSYYALQWTLLHFFSPGQQQQYRLVVVTAKPTAASAVGLAGPGAADVLPFVEADLKRSSLRVIDKAKELCAQVSDAVFEVVEGDARNVLCEAVERHHAEMLVVGNHGYGAIKRAVLGSVSDYCTHHAHCTVMVVKKPKHKH

SEQ ID NO: 11257 - protein, 422 aa, uncultured proteobacterium EBAC31A08
MVLKILEIFGHLIFELKPRYNIFMKEIIKEYTNYMVPFYAPADFVVKKASGSHVWDLNNKKYIDFTAGIAVTNLGHSNKDLIKILKKQSEELWHLSNLYINEPSVTLARKLCKNSFADKVFFCNSGAESIEAAVKIARKFCSSTVNKNKNEVISFSTSFHGRTMLGIALAKAKHLTDGFAPLPRGIKNHPYNDITNLEKVFSDKTAAVILELVQWQSGITKADKKFIAKIKKLAKKHKALVIIDEVQSGIGRTGTLFAYEQFNITPDILCFAKGISNGFPLGGILTSDKVSKHMSAGSHGTTFGGGPIACAIGNEVIDTISKKSFLNKVLKKEVRFINLLNKINEKHKCFEKITSAGLWVGVEVSKDSKIQIDDLIKKSHHNGLMILKANASTVRFSPSLIIENELVDEGLKIFEKSIISLL

SEQ ID NO: 11258 - protein, 432 aa, Glycine max
MAQILAPSTQWQMRISKSSPNASPITSNMWSSLLWKQNKKVSPTSSAKFRVMAIKSDNSIINRLEGLLNLDITPFTDKIIAEYIWIGGTGIDVRSKSRTISKPVEHPSELPKWNYDGSSTGQAPGDDSEVILYPQAIFKDPFRGGNNILVICDSYTPQGEPIPTNKRHRAAEIFSNPKVQAEVPWYGIEQEYTLLQTNVKWPLGWPVGGYPGPQGPYYCSAGADKSFGRDISDAHYKACLYAGINISGTNGEVMPGQWEYQVGPSVGIEAGDHIWASRYILERITEQAGVVLSLDPKPIEGDWNGAGCHTNYSTKSMREDGGFEVIKKAILNLSLRHKDHISAYGEGNERRLTGKHETASINTFSWGVANRGCSIRVGRDTEKNGKGYLEDRRPASNMDPYVVTSLLAETTLLWEPTLEAEALAAQKLALKV

SEQ ID NO: 11259 - protein, 253 aa, Vitis labrusca x Vitis vinifera
MVRAPCCDKVGLKKGPWTTQEDQNLTAYVLQHGHGNWRALPKQAGLLRCGKSCRLRWINYLRPDIKRGNFSREEEDTIIELHEKLGNKWSAIAASLPGRTDNEIKNVWHTHLKKRLKKKLATPDSKGHFTPAASACDSDSFNSSGKMSPQPSSSEFSSFTDSSTRTMETHSTGVKNEQMEEYSPESFPEIDESFWSDALSSDNSSMASDFPAVADELQLQTPELACGQISNMMDDGMEFWYDVFIRAGGLQEL

SEQ ID NO: 11260 - protein, 145 aa, Zea mays
MAASDVEYRRFVGGLAWATDDHSLHNAFSTYGEVLESKIILDRETQRSRGFGFVTFSTEEAMRNAIEGMNGKELDGRNITVNEAQSRGGRGGGGGGGYGGGRGGGGYGGGGRRDGGGGYGGGGGYGGRREGGGGGYGGGGGGWRD

SEQ ID NO: 11261 - protein, 772 aa, Oryza sativa (japonica cultivar-group); identical to SEQ ID NO: 6847

SEQ ID NO: 11262 - protein, 339 aa, Oryza sativa (japonica cultivar-group)
MALVRQRRHLPHLTLPLDHFALRPPPAPQQQQQPAVAPSTSSDVRLSDFERISVLGHGNGGTVYKARHRRGCPAQQPLALKLFAAGDLSAAREAEILRLAADAPHVVRLHAVVPSAAGGVEEPAALALELMPGGSLAGLLRRLGRPMGERPIAAVARQALLGLEALHALRIVHRDLKPSNLLLGADGEVKIADFGAGKVLRRRLDPCASYVGTAAYMSPERFDPEAYSGDYDPYAADVWSLGVAILELYLGHFPLLPVGQRPDWAALMCAICFGEAPEMPAAASEEFRDFVSRCLEKKAGRRASVGELLEHPFIAERDAADAQRSLAALVAEAEQSGDL

SEQ ID NO: 11263 - protein, 606 aa, Pasteurella multocida
MTNLNLHFVNRIREQAKLLLNETALRYHTPSGWENISWHQFQQDLDTFSYALLANHIGVQDKIAIFAHNMPRWTIADIGTMQVRAVVVPIYATSAAKQVEYILNNADVKILFVGDQEEYNCTLEIIDACPQIQKIVAMKDNLDLKNHPKACDWQTFLLEGSPLQQTALQERLEQKQLTDLFTLIYTSGTTGEPKGVMLDYANLAHQLKAHDEAFTTLNVSQYDSSLSFLPLSHIFERAWVAYVLHRGAVNCYLEDTNRVREALSEIRPTLMCAVPRFYEKIYTAVWDKVQKAPLFRRMIFNWAIAVGQKRFQFISQKKPIPFVLRQQYALADKLVLSKLRQLLGGRIRMMPCGGAKLEPNIGLFFHSIGINVKLGYGMTETTATVSCWEEGHFEPNSIGTLMPGAEVKIGENNEILVRGGMVMRGYYKKPQETADSFTEDGFLKTGDAGEFDPQGNLYITDRIKELMKTSNGKYIAPQYIETKVGKDKFIEQIAVIADAKKYVSALIVPCFNSLEEYAKQLNIKYHDRLELIKHSDILQMFEQRINDLQKELPSFEQIKKFTLLPQAFTTKMEEITPTLKLRRKVILERYKAQIEAMYKEYTHKKD

SEQ ID NO: 11264 - protein, 240 aa, Atriplex hortensis
MSYSYPPPLPSNTLNNFLSPKPVTMKTTGGPPKPTKLYRGVRQRHWGKWVAEIRLPKNRTRLWLGTFDTAEEAALAYDKAAYKLRGDFARLNFPNLRHEGSHIGGEFGEYKPLHSSVNAKLEAICESLAKQGNEKQGKSGKSKKKDVANNNNNTSSSSSSSCCTTATAAADAPQQQQRMPENGGDVKTESTSDSEVGSGGSSPLSDLTFGDNEEMGSENFLLESCPSHEIDWDAILSSES

SEQ ID NO: 11265 - protein, 474 aa, Lactobacillus plantarum WCFS1
MDLSHTRLLRKKDINAMLATYHSPLKKELKTFDLTMLGIGAIIGTGIFVLTGTGALTAGPGLMISFVLAAIACLFASLCYAEFAAMVPESGSAYTYAYTTLGEIVAFIIGWDLMLEYLFAVSTVSAGWSGYFQSFLAGFGLKLPAALSAAAGSVPGVTSYFNLPAFTIIILITTLLSLGVKETKRVNNVMVVIKLAVVLLFIFTAVRFIKPANWSPLLPFGFKGVFGAASSVFFAFIGFDAISSSVEETLEPSKTLPRSMLLSLGICTILYVAVSAIMTGVVPFETFAKYIDHPISAVLIYSGQNWMAGIIDLGAILGMTTVMLVCLYGQTRISFSMSRDGLLPHVFSDISAKTGAPLKSTVLFGSIAAIMGGFIPLADLAELVNIGTLTAFTLVSFSILRLRKTQPDLRRPFKTPWVPFVPIMSIICCVFLLINLKPVTWIRFVVWLAIGMVVYFGYSVKHSQLKTDTATDEK

SEQ ID NO: 11266 - protein, 382 aa, Saccharomyces cerevisiae
MRALAYFKKGDIHFTNDIPRPEIQTDDEVIIDVSWCGICGSDLHEYLDGPIFMPKDGECHKLSNAALPLAMGHEMSGIVSKVGPKVTKVKVGDHVVVDAASSCADLHCWPHSKFYNSKPCDACQRGSENLCTHAGFVGLGVISGGFAEQVVVSQHHIIPVPKEIPLDVAALVEPLSVTWHAVKISGFKKGSSALVLGAGPIGLCTILVLKGMGASKIVVSEIAERRIEMAKKLGVEVFNPSKHGHKSIEILRGLTKSHDGFDYSYDCSGIQVTFETSLKALTFKGTATNIAVWGPKPVPFQPMDVTLQEKVMTGSIGYVVEAFEEVVRAIHNGDIAMEDCKQLITGKQRIEDGWEKGFQELMDHKESNVKILLTPNNHGEMK

SEQ ID NO: 11267 - protein, 324 aa, Escherichia coli O157:H7 EDL933
MQYNPLGKTDLRVSRLCLGCMTFGEPDRGNHAWTLPEESSRPIIKRALEGGINFFDTANSYSDGSSEEIVGRALRDFSRREDVVVATKVFHRVGDLPEGLSRAQILRSIDDSLRRLGMDYVDILQIHRWDYNTPIEETLEALNDVVKAGKARYIGASSMHASQFAQALELQKQHGWAQFVSMQDHYNLIYREEEREMLPLCYQEGVAVIPWSPLARGRLTRPWGETTARLVSDEVGKNLYKESDENDAQIAERLTGVSEELGATRAQVALAWLLSKPGIAAPIIGTSREEQLDELLNAVDITLKPEQIAELETPYKPHPVVGFK

SEQ ID NO: 11268 - protein, 319 aa, Mesembryanthemum crystallinum
MGYLDSVLSSSNQVHVEEQPVSGGGISQNGKFSYGYASSPGKRSSMEDFYETRIDGVEGEVVGLFGVFDGHGGARAAEYVKQNLFSNLIKHPKFISDTKSAIAEAYTHTDSEFLKSENTQNRDAGSTASTAILVGDRLLVANVGDSRAVICRGGEAIAVSRDHKPDQSDERQRIEDAGGFVMWAGTWRVGGVLAVSRAFGDKLLKQYVVADPEIQEEVVDSSLEFLILASDGLWDVVTNEEAVTMVKPIQDTEEAAKKLMQEAYQRGSADNITCVVVRFLDNPIDSSSNRISGNHGDTSSRVLGGSHTDSSNRFLGKPR

SEQ ID NO: 11269 - protein, 144 aa, Gossypium anomalum
LGTSTFSEYTVVHVGQVAKINPEAPLDKVCVLSCGMSTGFGATVNVAKPKKGGSVAVFGLGAVGLAAAEGARVCEASRIIGIDLNPNRFEEAKKFGFTEFVNPKDHNKPVQEVIAEMTGGGVDCSIECTGSTQAMVSAFECVHD

SEQ ID NO: 11270 - protein, 441 aa, Glycine max
MLEGPTFLVSRDLPSSCEQETRWIYNSFCVMELASNKRQLELEEEAVLTKSCKLSDAPEEGETKMNFQNLSLSVNQANDQNHSSDQSDSSSLIFQLGRDISINCLLRCSRSDYGSIASLNQSFRSLVRTGELYRLRRQMGIIEHWVYFSCNLPEWEAFDPNTRRWMRLPRMPSNECFICSDKESLAVGTELLVFGKEIMSPVIYRYSILMNAWSSGMEMNIPRCLFGSASLGEIAILAGGCDPRGNILSSAELYNSETGTWELLPNMNKARKMCSGVFIDGKFYVIGGIGVGNSKQLTCGEEFDLQTRKWQKIPNMFPGRNGGTEATEVSAAAEAPPLVAVVNNVLYSADYAQQEVRRYDKDNNLWVTIGRLPDRIVSMNGWGLAFRACGNRLIVIGGPRALDGRVIEINACVPGEGVPEWNLLASRQSGSFVYNCAVMGC

SEQ ID NO: 11271 - protein, 314 aa, Triticum aestivum
  unsure (1)..(314): unsure at all Xaa locations
MLLRLKITTVQPVALLLGHDHGATASPRRLAGALPQGGGASTRAKRLRSVAVAMALKEEEPESSRSRFAGGGPSWDPRMEIGVPYEQRPVNEYSALKESTLYSXWAELSPGSFMXRLGSLCLVTFTXVLAAPISAGKFQVPERLPLKFVLAPGXVSLVVLRIYLGWSYVGDRLLSAVVPYEETGWYDGQMWVKPAEVLARDSLLGSYKVKPVINLLKQTLVGTGALLVGAVALFAFAAPVEEFVHSFNGAPTTASFKPIMRREDLLKLPAEVRQDDDLAAAAAEAANGRPVYCRDRYYRALAGGQYCTSDDLLN

SEQ ID NO: 11272 - protein, 245 aa, Glycine max
  unsure (1)..(245): unsure at all Xaa locations
RVRTVARRRQKGNQRNSLYPQVRGSNPDAASPILITNHSSSSQPCLYPSVDYNDLVENLFSEDATDACSPSAPPEATEEVLFRIPGAILNLVDKDYSVELACGDFSVIRLRQGDNAVSVYARVADEIQWPLAKDAAAVKLDDSHXXXXXXXXXGFDPDEEEDVLSYGLTIASKGQERLVKDLDAVLENCSCFSVQSVSENARRXGEALDGTVAREVSPKDMESGKKKEMMEERCAAYWTTLAPNV

SEQ ID NO: 11273 - protein, 152 aa, Yarrowia lipolytica
MSDDWESKTVIGSRARVGGGGPRATVAKTQAEINAAMRSGNVLSTDKKYASANSKDGGDGQRLTKIDRSDDIIAPPKVEASVGKAIIKGRSEKGLTQKELAVKINEKPQVVNDYESGRAQPNQQVLSKMERVLGIKLRGKDIGLPLGPKGKK

SEQ ID NO: 11274 - protein, 310 aa, Bifidobacterium longum NCC2705
MTTSSVSPVTTELAGSETGITLIIHAGAGSRGKHSTPERIAQVELDLQRALDAGYQLLESGAPAHEAVVAAIHVMEDAPEFNAGRGAALTSDGIAQMDACLMTGDGEVGAVTGVSTVKNPIDAARAVKEQTKHVLFADPTDAEIADWGVATESNEYFITEQRRQSLAEAQSGGDEWEKHGTIGAVARDAEGNIAAGTSTGGITNQMHGRVGDSPLPGCGTFANQSTVAVSCTGIGEAFIKVVAAHQVSDRVRFAGENVEDAATATLDEVAAHHGDGGMIVLPAVGRGVVAYNSEMMNFGYRSAQGGKVQG

SEQ ID NO: 11275 - protein, 361 aa, Escherichia coli K12
MMKTMRIAAIPGDGIGKEVLPEGIRVLQAAAERWGFALSFEQMEWASCEYYSHHGKMMPDDWHEQLSRFDAIYFGAVGWPDTVPDHISLWGSLLKFRREFDQYVNLRPVRLFPGVPCPLAGKQPGDIDFYVVRENTEGEYSSLGGRVNEGTEHEVVIQESVFTRRGVDRILRYAFELAQSRPRKTLTSATKSNGLAISMPYWDERVEAMAENYPEIRWDKQHIDILCARFVMQPERFDVVVASNLFGDILSDLGPACTGTIGIAPSANLNPERTFPSLFEPVHGSAPDIYGKNIANPIATIWAGAMMLDFLGNGDERFQQAHNGILAAIEEVIAHGPKTPDMKGNATTPQVADAICKIILR

SEQ ID NO: 11276 - protein, 268 aa, Ralstonia solanacearum
MTADSTLLGILLATALSGIGSMAGAAALSLTVLARVVDRMVSFSVGVLLATSLLHSLPEAFESHHGIEPNTHALFATLLAGLLGFFLLEKIALIRHSHHHEGDGHGHHHGHDRQEAGRSGLMILVGDGLHNFSDGIVIAAAFLADTRVGIVTALAIAAHEIPQEIGDFMVLLNAGFSKTRAFVYNLICSVCALVGAVLGYYLLDRMSAWIPYVLVVASSSFIYIAVCDLMPQMKRRPRWQESAVQIALVTAGIVMIFLLTDGLHHHAH

SEQ ID NO: 11277 - protein, 432 aa, Juglans nigra
MAHILTPTTRWQMRITKNSANASPMTAKMWGSLLLKQNKKGSSKSSAKFRVFATKSENSTVNRIEKLLNLDLTPYTDKIIAEYIWIGGSGIDLRSKSRTISKPVEHPSELPKWNYDGSSTGQAPGEDSEVILYPQAIFKDPFRGGNNILVICDTYTPAGEPIPTNKRHRAAEIFTNKKVADEVPWYGIEQEYTLLQQNVKWPLGWPVGGYPGPQGPYYCGAGADKSFGRDISDAHYKACLYAGINISGTNGEVMPGQWEYQVGPSVGIEAGDHIWCSRYILERITEQAGVVLSLDPKPIEGDRNGAGCHTNYSTKSMREDGGFEVIKKAILNLSLRHKDHISAYGEGNERRLTGKHETASINTFSWGVANRGCSIRVGRETEKQGKGYLEDRRPASNMDPYIVTSLLAETTILWEPTLEAEALAAQKLALNV

SEQ ID NO: 11278 - protein, 166 aa, Trichodesmium erythraeum IMS101
MIRQITSSSPVPPEQQPVNEYEELKNSWLFCWVTLERFDYLRKLVWVWVWSWLVSGPVAAASFPPEKSLVQFLLSGSAGASLILILVLLRLYLGWNYVRARLANKTVFYEESGWYDGQTWLKTPEEIIKDRLILQYQVQPLMQRLRKTFYSFTLVIFIGGIIWLCL

SEQ ID NO: 11279 - protein, 393 aa, Lemna gibba
DLEPVNPSDVPVTAAGALKSYKLAAKAISRLQSLPSGNISLLCDVLVREVKDLTGYDRVMAYKFHEDEHGEVVSECRGSDLEPYLGLHYPATDIPQASRFLFLKNKVRMICDCSAQPVRIIQDKRLSQPLSLCGSTLRAPHGCHAQYMKNMGSIASLVMSVTINDEGVDHGGEEQQKSRKLWGLVVCHHSSPRFIPFPLRYACEFLMQVFAIQVNKEVEIAAQKREKHILKTQTFFCDMLLREAPVGIFTQSPNVMDLVKCDGAALYYRNQFRLLGVTPTEAQIKDLCDWLMDWHNNTTGLSTDSLSEAGFPGASSLGDAVCGMAAIKITGKDFVFWFRSHVAKEIKWGGAKDESVGRSEEGRKLYPRSSFQAFLEIVKRRSLPWEDVEMDAI

SEQ ID NO: 11280 - protein, 330 aa, Triticum aestivum; identical to SEQ ID NO: 3422

SEQ ID NO: 11281 - protein, 370 aa, Sinorhizobium meliloti
MTVRNLFLLPGDGIGPEAMAEVRKIIAYMNAERDAGFVTDEGLVGGSAYDAHGAAISEGDMAKALAADAVLFGAVGGPKWDAVPYEVRPEAGLLRLRKDLELFANLRPAICYPALANASSLKPELVEGLDILIVRELTGGVYFGEPKEIVDLGNGQKRGIDTQVYDTYEIERIAGVAFELARTRNNRVCSMEKRNVMKSGVLWNQVVTETHKAKYSDVQLEHMLADAGGMQLVRQPKQFDVIVTDNLFGDMLSDVAAMLTGSLGMLPSASLGAPDAKTGKRKALYEPVHGSAPDIAGTGVANPIAMIASFAMCLRYSFNLVKEADDLEKAIANVLDQGIRTGDIMAEGCRKVGTAEMGDAILAEFKSLSA

SEQ ID NO: 11282 - protein, 369 aa, Hirschfeldia incana
SSNKTLVSPGNVFELGFFRTTSSSRWYLGIWYKKLSNRTYVWVANRDNPLSNSIGTLKISNMNLVLLDHSNKSVWSTSLTRGNERSPVVAELLANGNFVMRDSNNKDASGFLWQSFDFPTDTLLPEMKLGYDLKKGRNRFLTSWRNSDDPSSGEISYQLDTQTGMPEFYLLQSGVRVHRSGPWNGVRFSGMPGDQELNYMVYNFTENNEDVAYTFRMTNNSIYSILKTSSEGFLERLIWTPNSITLTLFWYLPLENQCDMYLICGRYAYCDVNTSPLCNCIQGFIPWNKQQWEMRDPSGGCKRSTRLSCSGDGFTRMKNMKLPETKMAIVDRSIGVKECEKRCLMDCNCTAFANADIRNGGSGCVMWTG

SEQ ID NO: 11283 - protein, 305 aa, Miscanthus sinensis var. sinensis
IESVGEGVTDVAPGDHVLPVFTGECKECPHCKSAESNMCDLLRINTDRGVMIGDGKSRFSINGKPIYHFVGTSTFSEYTVMHVGCVAKINPQAPLDKVCVLSCGISTGLGASINVAKPPKGSTVAIFGLGAVGLAAAEGARIAGASRIIGVDLNPSRFEEARKFGCTEFVNPKDHKKPVQEVLAEMTNGGVDRSVECTGNINAMIQAFECVHDGWGVAVLVGVPHKDAEFKTHPMDFLNERALKGTFFGNFKPRTDLPNVVELYMKKELEVEKFITHSIPFAEINKAFDLMAKGEGIRCIIRMEN

SEQ ID NO: 11284 - protein, 752 aa, Cytophaga hutchinsonii
MKIKDIVNRDLVNLQNCDQEPIHIPGSIQPHGFLIAITKETWEIRFCSENVIDFIGLSHKQLLGKKITEIFDDIFFGKVIQCKDYAVGESKLIQGKIEDKEFDFTAHQNEDVIILESEIHIDNTPKNDLFDMSKQFMDYMEDSHTLIRLCELVASGIKKVTDYDRVMIYRFDKDYNGEVIAETKQDKLESFLGLHYPHTDIPVQARELYIKNLLRVIGDVNYKPVPIYTIDDSENQNLDLSCSVLRSVSPIHVQYLHNIGVGATLTISLIHKKKLWGLVACHHYSPKYLHYETKLAAKLQGHFITSQIEIREQNEQYATSQKLHQAVDDLISRKFSADRNSLKDIVIDSNVLQLCKAAGISILIDKKEVYKSGLTPADGDIQKLAEYVKHAIDKEQYATHFITAELPDFKNITASGIAGINYHALDKTSNSCIMWYKPETITEVKWAGDPNKAIEKDKNGLSPRKSFELWGEKVKNQSIPWSQPDLIASSNFANFLQKHLGYIFLAEEEEKQRQMTEILKEVNSELENINWISTHDLQEPLRKIQIITSYVLSVENTLSEASYEKLQKINKSANRMQALISDILRYTKLKASTEILESVDLKNIVTEVIQEVDDALEAKKANIYISDLPEMSGIPFLLAQLFLNLISNSLKFADATRVLSIHIVQEGIIVKEEQEYYKISYTDNGIGFNKDYNELIFKIFSRLHSVAEYPGSGIGLALCKKIMKTHKGFIEAQGIPEKGAIFYLYFPVSKNS

SEQ ID NO: 11285 - protein, 388 aa, Zymomonas mobilis
MSQPRTVTVLGATGSIGHSTLDLIERNLDRYQVIALTANRNVKDLADAAKRTNAKRAVIADPSLYNDLKEALAGSSVEAAAGADALVEAAMMGADWTMAAIIGCAGLKATLAAIRKGKTVALANKESLVSAGGLMIDAVREHGTTLLPVDSEHNAIFQCFPHHNRDYVRRIIITASGGPFRTTSLAEMATVTPERAVQHPNWSMGAKISIDSATMMNKGLELIEAFHLFQIPLEKFEILVHPQSVIHSMVEYLDGSILAQIGSPDMRTPIGHTLAWPKRMETPAESLDFTKLRQMDFEAPDYERFPALTLAMESIKSGGARPAVMNAANEIAVAAFLDKKIGFLDIAKIVEKTLDHYTPATPSSLEDVFAIDNEARIQAAALMESLPA

SEQ ID NO: 11286 - protein, 248 aa, Anthurium andraeanum
MTAKAKRGAAVAAEARVAKKRVVKLNKGPWTAEEDQKLVEYVDAHGDRKWTSLPTKAGLNRCGKSCRLRWLNYLRPGIKRGNISEAEEDMIIRLHNLIGNRWSLIAGRLPGRTDNEIKNYWNTHLSKKPLTISDLNDKLNDDGGSRSDVDEPPSSGQSQGPLDSRRPAEPRISEASNEVAFNVDELVNLPAILDFDDLLDSGSCSDGIITSSQIFWTPNFSAHDQQDISDFDDLGMLMDIMDYVICPP

SEQ ID NO: 11287 - protein, 418 aa, Neurospora crassa
MSSAEPFNPHSVDLDTVDPKDVVCYLNSSPNDYNGRIGLRISALFVIMATSSLTTLFPVLATRIPRLRIPRYVYLFARYFGAGVIIATAFIHLLDPAYEEIGPASCVGMSKGWDSYSWPPAIAMTAVMLIFLLDFGVEWYVEQNYECDQADVSVEKVITTCPGHSTDGANSSDEGHSSESHDDCHNSPHKPSTTGHDAHHGHQFLHSGDQDAPTPIALPTAALPTTDSHGHDTSKDTIDIESHAFLTGESPASERIFREQIAAFLILEFGVLFHSVIIGLNLGVVGEEFSTLYPVVVFHQAFEGLGIGARLSSIPFPKRLSWMPWALCVAYGLTTPIALAIGLGVATTYESAGFTASIISGVLDSISAGILLYTGLVELLARDFLFNPERTRDKTRILFMLACLFAGCILMALLGKWA

SEQ ID NO: 11288 - protein, 483 aa, Xylella fastidiosa 9a5c
MLKKHLFIVKPIEPTNHTGTGKGETQLKRSLTAGQLVMLGIGAVIGAGIFVLSGHAAAEYAGPAVVLSYILAGIACALAGLCYAEFAAMLPVSGSAYSYAYATLGEFTAWFIGWNLVLEYMFSASTVAVGWSGYLNSFLSSFGYGLPASLSSAPLDVVDGRLIYSGGLINLPAVAIVAAISGLCYVGITQSAFVNSITVAIKVSVIVLFIAFAARYVNPDNWVPFVPDNAAPGKYGMEGVIRGAAVVFFSYIGFDAVSTTAGEAKNPQRDMPIGILGSLAICTVIYIAFSGVLTGLMHYSQLDTPKPVATALETYPTLSWLKHVVEIGAIAGLSSTMLMMLMAQPRIFYAMSQDGLLPKLLSKVHPKFQTPHVGTLLVGACACTLAGLFPISLLGDLVSMGTLLAFATVCIGIVVLRRTRPDLPRPFRVPMYWVIAPAGAAACLYLFWQPFTEHWPLMVGWTVLGLVMYGLYGYHHSKLRRGG

SEQ ID NO: 11289 - protein, 430 aa, Escherichia coli O157:H7 EDL933
MMNTEGNNGNKPLGLWNVVSIGIGAMVGAGIFALLGQAALLMEASTWVAFAFGGIVAMFSGYAYARLGASYPSNGGIIDFFRRGLGNGVFSLALSLLYLLTLAVSIAMVARAFGAYAVQFLHEGSQEEHLILLYALGIIAVMTLFNSLSNHAVGRLEVILVGIKMMILLLLIIAGVWSLQPAHISVSAPPSSGAFFSCIGITFLAYAGFGMMANAADKVKDPQVIMPRAFLVAIGVTTLLYISLALVLLSDVSALELEKYADTAVAQAASPLLGHVGYVIVVIGALLATASAINANLFAVFNIMDNMGSERELPKRMNKSLWRQSTWGNIIVVVLIMLMTAALNLGSLASVASATFLICYLAVFVVAIRLRHDIHASLPILIVGTLVMLLVIVGFIYSLWSQGSRALIWIIGAILLSLIVAMVMKRNKTV

SEQ ID NO: 11290 - protein, 331 aa, Listeria monocytogenes EGD-e
MKYVKFGNTGMDVSKICLGTMGFGDKDKWIHKWVLDEANSRPIIKKALDLGINFFDTANIYSYGESEKIVGRALKDYANRDDIVLATKVQQTMRPDRPNSGGLSRKTILSEIDHSLKRLETDYVDLYIIHRFDENTPIEETMEALHDVVKSGKARYIGASAMYAWQFQKAQRVAERNGWTKFVSMQNHYNMIYREEEREMIPFCRDEKIAITPYSPLASGRLTRDLNETTDRSETDPVQKSKYDDMMNADKGIIERVAELAETHQVSRDKIALAWLLNKDEITSPIIGAQKESHLESAVEALNIKLTTSEVNYLEELYIPHPVVGALPTTK

SEQ ID NO: 11291 - protein, 580 aa, Oryza sativa (japonica cultivar-group); identical to SEQ ID NO: 9618

SEQ ID NO: 11292 - protein, 582 aa, Ferroplasma acidarmanus
MADSISEKTVIANSKLQDKRLKKALNTWDLYFLSLGGIIGSGWLFAAAASAGTTGPAAILSWIIGGVIVLFIALVYAELGSMIPRTGAISRYGHYSHGGVAGLFFGWTYFLSAVSVPAIEAEAVITYASSYIKGLSYSAPNPINPSATVALLTGLGILLAAILIVAFFALNYAGVRIMGKTNTGMTWWKLIIPSITIVMLAFLVFHTSNFTSPALGGFLPGNNSATIFEAVSTDGIVFSFLGFRQALDYGGEAKTPQKSIPRATIFSVLTGIVVYVLLQVVFIGAIDPTKLAAAGGWFGLVSSTPTTYAASVVAAPFAFLAKSSGIFALVVLTYVLYADAYVSPAGTLNVYAGTSTRTLFGLAEIGYFPKQLSVVSKKTHVPVLPIILSVIIGIIFLAPFPSWYALVGLITGATAFTYIVGGSALMVLRREADALKRPFKLPFAKILAPIAFIGATLIVYWSGWPTIPYLAIGIFLGIVVYLIILATHKVENVFTKENIKAGWWVPGFILVLTLLSYLGEGDYGGTNTLPYPYDFVVVIIVAIIFYLISIRSGYRTEEISDIIESGTQYIQEEDVTTTAGQK

SEQ ID NO: 11293 - protein, 216 aa, Salmonella typhimurium LT2
MLDLFADEAPWQEPLAPGAVVLRRFAFRAAQSLLDDIGFVASQSPFRQMVTPGGYTMSVAMTNCGALGWTTDRHGYCYAVRDPLTDKPWPALPLSFASVCRQAAIAAGYASFQPDACLINRYAPGAKLSLHQDKDEPDLRAPIVSVSLGVPAVFQFGGLRRSDPIQRILLEHGDIVVWGGESRLFYHGIQPLKAGFHPMTGEFRYNLTFRQAAEKE

SEQ ID NO: 11294 - protein, 182 aa, Bifidobacterium longum NCC2705
MAVENSKVLIIVNNWGIEETELTRPLRDLKAAGAKVTLAATTLDPCETVQHDRYEGETLTPDARLSDVQAADYDLLVVPGGTCNVDRIRVNEDAITLAQEFAHEGKPIAAICHGAWLLVNAGLVAGKTAAPCRYIAADIENAGGHYVDEQLHVDDANGFKLITSRKPDDLDYFVGAIKDALK

SEQ ID NO: 11295 - protein, 583 aa, Oryza sativa
  unsure (1)..(583): unsure at all Xaa locations
LKVLVLGVKANGYVQMLIIAVITFVNSKSSLRSAFACXXAGGPAATLPFCRRSLPARARARDLVARLTRAEKVRLLVNNAAGVPRLGVAGYEWWSEALHGVSDTGPGVRFGGAFPGATAFPQVIGTAASFNATLWELIGQAVSDEGRAMYNGGQAGLTFWSPNVNIFRDPRWGRGQETPGEDPAVAARYAAAYVRGLQQQQPSSGRLKLAACCKHFTAYDLDNWSGTDRFHFNAVVTRQDLEDTFNVPFRSCVVDGRAASVMCSYNQVNGVPTCADAAFLRGTIRRRWGLAGYIVSDCDSVDVFYSDQHYTRTREDAVAATLRAGLDLDCGPFLAQYTEGAVAQGKVGDGDIDAAVTNTVTVQMRLGMFDGDPAAQPFGHLGPQHVCTAAHQELAVEAARQGIVLLKNDGRALPLSPATARRAVAVVGPHAEATVAMIGNYAGKPCRYTTPLQGVARYAARAAHQPGCTDVACAGSGQPIAAAVDAARRADATIVVAGLDQKIEAEGLDRASLLLPGRQAELISSVAKASKGPVILVLMSGGPIAIGXAQNDPKIAGILWAGYPGQAGGQAIADVIFGHHNPX

SEQ ID NO: 11296 - protein, 263 aa, Methanosarcina barkeri
MYSWDPKLYSSNSSAQKNWGFELLAKLNLKGNERFLDVGCGDGKLSAEVAKILPEGSVLGIDLSEEMITFARNHYPQEKFPNLAFMQANASELTFDYEFDIVFSNAVLHWIKVPEAALKGFWKSLKPGGVFLAQLGGRGNAAEILKTLDYMLENDKWSSYFKDFVFPYGFYGPEEYGKWLKDAGFLIKRLELISKDMALHGENELFAWIASTWHPYIQRVPPELKEDFISELVTLFVKNYPPDDKGYVHVQMKRLEIEAYREK

SEQ ID NO: 11297 - protein, 356 aa, Vibrio cholerae
MKENKSRKSNDAKSITISLAMHGALVAILLWGADFTMSDPEPTGQMIEAVVIDPQLVRQQAQQIRSQREEAAKKEQERLDKLRRESEQLEKNRQAEEERIRQLKEQQAKEAKAAREAEKLREQKEQERLAAEQKAREEKERAAKAEAERKVKEEAAKKAEQERVAKEAAAAKAEQQRIEREKEAKLAEEKAKREKEVAAKAEQERLAKEKAAKEAADKAKKEKERAAKAEAERKAQEAALNDIFGSLSEESQQNNAARQQFVTSEVGRYGAIYTQLIRQNLLVEDSFRGKQCRVNLKLIPTGTGALLGSLTVLDGDSRLCAATKRAVAQVNSFPLPKDQPDVVEKLKNINLTVAPE

SEQ ID NO: 11298 - protein, 218 aa, Neurospora crassa
MNRLFGTSSKPTAPKPTLTTAISSLDTRLSSIDVKLASLTAELSGYQSKLSKMRDGPGKSALKQKALKVLRQRKQYEAQRDQIQSQVWNMEQAQTMQDNLKNTMVTIDALKTTNKQLKKEYGKVDIDKIERLQDEMADLLDVGNEIQESLARSYEVPEDVDEDELDAELEALGQEVELEREMYGGMEAGAVPSFMQDEVPEFVDEEPKVGGKVKEVAG

SEQ ID NO: 11299 - protein, 329 aa, Zymomonas mobilis
  unsure (1)..(329): unsure at all Xaa locations
MTRGAEFLNCRYAIMGGAMSWVSERHLVSALSKCGCFGVVACGAMSPALLDEEITATKQLTQQSFGVNLITMHPELDQLIDVCLNQKVSHVVLAGGLPTTAAIEKLKKGGAKVICFAPALILGRKLLRAGVDALVIEGMEAGGHIGPVTTTVLAQEILPALAEKLPIFVAGGIGRGESIAAFLEMGAAGVQLGTRFVCATECIAHPKFKQAFIRAAARDAVTSVQIDPRLPVIPVRALKNATTENFIAKQREVAKALDDGELALPDAQLMIEHYWAGSLXRAVIDGDIENGSVMAGQSVGMVKQEEPAQVIIENLVEEAAIALAKRNVI

SEQ ID NO: 11300 - protein, 469 aa, Stigmatella aurantiaca
MTARPIQLNGHFKDKRWSTWSWRLKAAAQQPVYDTPDALNGVLERLRQMPALVRSSECASLREQLAQVANGWGFLLHAGDCAERFSDIHRQELTRKVRAMGQMGLLVQHATQQPVVQVARMAGQFAKPRSQGMETVNGVQLPVYRGDIVNDVAANADARRSDPQRLIQAYLYSSAVLNQLRALNGESLMSLGLGEEEWHLSMLGDLSYEERSYRHVVNQLNSILKSSPVGAYDAINLFVSHEGLHLAYEESLTGAGDDHHPYNLSTHYLWLGERTRQLDGAHIEYFRGIHNPIGVKIGPNCKPDELKELISLLNPNNEPGRLTLITRFGKDRITQCLPPLIEAVQQMDARVIWSCDPMHGNGIVSSQGIKTRRFQDILSEVRSAFDIHDAEGSRLGGLHLECTGSEVTECLGGSVNIEEADLSTNYTSACDPRLNASQSLELVFMISDCLQRQALRGSYLKAEEMRVSG

SEQ ID NO: 11301 - protein, 394 aa, Melica cupanii
EPARTEDPALSIAGAVQSQKLAVRAISRLQALPGGDVKLLCDTVVEHVRELTGYDRVMVYKFHDDEHGEVLAESRRADLEPYLGLHYPATDIPQASRFLFRQNRVRMIADCGAAPVTVIQDPAMPQPLCLVGSTLRSPHGCHAQYMANMGSIASLVMAVIISSGGDDDHNMVRGSIPSAMKLWGLVVCHHTSPRCIPFPLRYACEFLMQAFGLELNMELQLAHQMSEKHILRTQTLLCDMLLRDSPTGIVTQSPSIMDLVKCDGAALFYHGKYYPLGVTPTEAQIKDIIEWLTVCHGDSTGLSTDSLADAGYSGATALGDAVCGMAVAYITPSDYLFWFRSHTAKEIKWGGAKHHPEDKDDGQRMHPRPSFKAFLEVVKSRSIPWENAEMDAIH

SEQ ID NO: 11302 - protein, 113 aa, Glycine max
  unsure (1)..(113): unsure at all Xaa locations
RDDRRALGWCIEWLQAYFLVLDDIMDNSHTRRGQPCWFRVPKVGMIAANDGVLLRNHIPRILKKHFRGKPXYYVDLLDLFNEVVEFQTASGQMIDLIITLEGEKDLSKYTLTL

SEQ ID NO: 11303 - protein, 186 aa, Zea mays
  unsure (1)..(186): unsure at all Xaa locations
MNRKPGDWDCRACQHLNFSRRDICQRCSEPRGVADRGSGGGGGGGGGDYASFGGRGGSSFGGGFGXAGSDVRPGDWYCSCGAHNFASRSSCFKCSAYKEEAAVNSGAGGFDGDMSRSRGYGFGSGAAXAGAGAARTTNRPGWKSGDWICTRSGCNEHNFASRMECFRCNAPRDSGSAAMTYENYLH

SEQ ID NO: 11304 - protein, 228 aa, Gossypium pilosum
  unsure (1)..(228): unsure at all Xaa locations
FTSLCHTDVYFWEAKGQTPLFPRIFGHEAGGIVESVGEGVTHLKPGDHVLPVFTGECGNCRHCKSKESNMCDLLRINTDRGVMLSDGKTRFSINGKPIYHFVGTSTFSEYTVAHVGSVAKINPAAPLDKVCILSCGISTGLGATLNVAKPAKGSTVAIFGLGAVGLAAAEGARIAGASRIIGVDLNPNRFEEAKKFGCTXFVNPKDHNKPVQEVLAEMTNGGVDRSVE

SEQ ID NO: 11305 - protein, 376 aa, Saccharomyces bayanus
INSWNPTLLKEISSTKFESKLFDSNKVSEYSFKNLSMDDVRLIYKNIPKAGFIEVFTNLYNSFNVTAYRQKELEIQYCQNLTFIERKRLLHQLRINVAPKLSSPAKDPFIFSYEKAMWKELSESMNQTVLDQVTNMVHEEYVDKIIGLSEGLKFKNFTLFNITLDGTGAIANDNSDDFVPASDTNVNPVDFQSHLNFSGNPFLDLNSYGLDLFAPTLSDSNRKGILMFDKDPIIVYEDFAYAKVLERRKKKEKEDKKKKEEEDKKKKEEEEKKKKEEEAKKKKEEEEKKKKEEEDKKKKEEDEKKKKEEEDKKKKEEEGKNNEEEDKKKKEEDEKKKKEEEDKKKKEEEGKNNEEEDKKKKEEDEKKKKEEEDKKK

SEQ ID NO: 11306 - protein, 228 aa, Gossypium australe
  unsure (1)..(228): unsure at all Xaa locations
FTSLCHTDVYFWEAKGQTPLFPRIFGHEAGGIVESVGEGVTHLKPGDHVLPVFTGECGNCRHCKSKESNMCDLLRINTDRGVMLSDGKTRFSINGKPIYHFVGTSTFSEYTVAHVGSVAKINPAASLDKVCILSCGISTGLGAALNVAKPTKGSTVAIFGLGAVGLAAAEGARIAGAXXXXXXXXXXXXXXXXKKFGCTEFVNPNDHNKPVQEVLAEMTNGGVDRSVE

SEQ ID NO: 11307 - protein, 479 aa, Zea mays
SRRGKKRQALEVVEELTGLDSRAADLDKEERPEILSLLPSYKGKSVLELGAGIGRFTGDLAKEAGHVLALDFIESVIKKNQSINGHHKNITFRCADVTSNDLKIEDNSVDLIFSNWLLMYLSDEEVQKLVGKMVKWLKVGGHIFFRESCFHQSGDSKRKVNPTHYREPRFYTKVFKEGHSFDQDGGSFELSLVTCKCIGAYVKNKKNQNQICWLWEKVKSTEDRDFQRFLDNVQYKTSGILRYERVFGEGFVSTGGIETTKEFVGMLDLKPGQKVLDVGCGIGGGDFYMAANYDVHVLGIDLSVNMVSFAIERAIGRKCSVEFEVADCTTKDYPENSFDVIYSRDTILHIQDKPALFRSFFKWLKPGGKVLISDYCKNPGKPSEEFAAYIKQRGYDLHDVKAYGQMLKDAGFHNVIAEDRTEQFLNVLQRELGEVEKNKDAFLADFTQEDYDDIVNGWNAKLKRSSAGEQRWGLFIATK

SEQ ID NO: 11308 - protein, 494 aa, Streptomyces avermitilis MA-4680
MTSQPTLSKAENGPDRPGEPGGGLQAGLKNRHLSMIAIGGVIGAGLFVGSSTGIATAGPGILLSYALVGTLVVLVMRMLGEMSAANPTSGSFSAHADRALGRWAGFSIGWLYWFFWVVVLAVEATAGAKILEGWMPGVPQWGWALIVMVVLTATNLVSVGSYGEFEFWFAGIKVVAIGAFIVVGGLAIFGVLPGVDAPKAGLGNLTDSGGFLPHGPGAILTGVLLVVFSFMGSEIATLAAGESEDPQRAVTKSTNSIIWRIGVFYLGSILVVVSLLPWNDPSIKDKGSYVAALDSLGIAHAGQIMNFIVLTSVLSCLNSGLYTASRMAFSLGQRGDAPKAFARTTSRGVPLAAIVVSVVFGFVAVFFNYKFPDSVFLFLVNSSGAVALFVWLVICFSQLRMRKIIQRESPEKLVVKMWLYPYLTWATAALIVFVLGYMLTDTEHDGRETVLLSLLVAAVVLVIAVVKQKLDGSRAVAAAGADEPAVAEAVADAH

SEQ ID NO: 11309 - protein, 338 aa, Haemophilus somnus 129PT
MAILVTGGAGYIGSHTVVELLNHHVEIVVLDNLSNSSEVSLQRVQQITGKNITFYQGDILDRKILQRIFSQHNIKAVIHFAGLKAVGESVKKPLRYYQNNVIGSLTLLEEMLKAGIYNLVFSSSATVYGDPEIIPITETCKVGGTTNPYGTSKFMVERILQDAVSANPHLSVVILRYFNPVGAHESGLIGEDPNGIPNNLLPYISQVAVGKLPQLSVFGSDYDTHDGTGVRDYIHVVDLAIGHLKALEKHQNDPGCHIYNLGTGIGYSVLDMVKAFEKANDIQIPYKLVERRPGDIATCYSNPQKALEKLGWKTERDLTQMMKDTWNWQKNNPNGYKS

SEQ ID NO: 11310 - protein, 469 aa, Glycine max; identical to SEQ ID NO: 4368

SEQ ID NO: 11311 - protein, 270 aa, Triticum aestivum
  unsure (1)..(270): unsure at all Xaa locations
GAXAQWRKIGSSPSWXKVCKRYRQYYQQLQAVISSFETVAGLSNAAPFASIALRTMSKHFKYLKSTIQSQLRNTSKVAGGKDSLGKEDMANFGLMAGGAALMRGSNANAFSQPHNIWRPQRGLPERAVSVLRAWLFEHFLHPYPTDSDKQMLAKQTGLTRNQVSNWFINARVRLWKPMVEEIHNLEMRQGHKSSAADKNQLGPQQQTQQHSPDSSGRPSDPSNSHQGQSSSMSQNRSAHAAHRHIQSELSPMTHDMPGQVSFAYNGSGMA

SEQ ID NO: 11312 - protein, 305 aa, Miscanthus transmorrisonensis
IESVGEGVTDVTPGDHVLPVFTGECKECPHCKSAESNMCDLLRVNTDRGVIIGDGKSRFSINGKPIYHFVGTSTFSEYTVMHVGCVAKINPQAPLDKVCVLSCGISTGLGASINVAKPPKGSTVAIFGLGAVGLAAAEGARIAGASRIIGVDLNPSRFEEARKFGCTEFLNPKDHKKPVQEVLAEMTNGGVDRSVECTGNINAMVQAFECVHDGWGVAVLVGVPHKDAEFKTHPMNFLNERTLKGTFFGNFKPRTDLPNVVELYMKKELEVEKFITHSIPFAEINKAFDLMAKGEGIRCIIRMEN

SEQ ID NO: 11313 - protein, 155 aa, Zea mays
  unsure (1)..(155): unsure at all Xaa locations
FWFVGEREEMAASDVEYRCFVGGLAWATDXHSLNNAFSTYGEVLESKIILDRETQRSRGFGFVTFSXXXAMRSAIEGMNGKELDGRNITVNEAQSRGGRGGGGGGYGGGRRDGGGYGGGGGGYGGGRGGYGGGGGGYGGGNRGGGYGNNDGNWRN

SEQ ID NO: 11314 - protein, 211 aa, Glycine max
MPNISSCTRNFSDVISFNSRLGRPVIGVHSQKPSMKYLNVSEPKKQGLQTPSPPIRTNVNGKGEGTTREVKKKRSEESSDAMLKKPKQDTSTASSSKVQAPKVKLGDKITALQQIVSPFGKTDTASVLFEAIGYIKFLQEQVQLLSNPFLKANSHKDPWGSLDRKDHKEDTKLDLRSRGLCLVPTSCTPLVYRESSGPDYWTPAYRGCLYR

SEQ ID NO: 11315 - protein, 258 aa, Triticum aestivum
MPDVWYFLLDWIWKVIEHFNFAPLTAVLSVNYLDRFFSVYPLPEGKAWVTQLLAVACLSLASKMEETYVPLPVDLQVVEATSAFEGRTIKRMELLVLSTLKWRMQAVTACSFIDYFLRKFNDHDAPSMLAFSRSTDLILSTAKGADFLVFRPSEIAASVALAAFGERNTSVVERATTTCKYINKERVLRCYELIQDKIAMGTIVLKSAGSSMFSVPQSPIGVLDAAACLSQQSDDTAVGSPATCYQASSASKRRRIGR

SEQ ID NO: 11316 - protein, 513 aa, Zea mays
METTAHAAASGTIQNARHRTSALKLCYHLAVSNAMYLLLAPAAAAAAHWLSRHSAAELAGSARSAAAANPPLAVALLVLGAVLATAYLMQRPRGVYLVDFACYKPGGEHVVTRETFMRQSEAAGVFTGDNLAFQRKILERSGLGQGTYFPKAVLNSPPNPCMAEARAEAEAVMFGAIDQVLAKTGVRARDIGVVVVNCSLFNPTPSLSAMIVNHYKLRGNVASYNLGGMGCSAGLISIDLAKQLLQVHRDTYALVVSMENITLNWYWGNNRSMLMSNCLFRMGGAAVLLTNRRSERRRAKYQLVHTVRTHHGADDRAYRCVFQEEDETGRVGVALSKDLMAVAGEALRTNITTLGPLALPMSEQILFLASLVARRVFGARGVRPYIPDFKMAFEHFCIHAGGRAVLDTIEKNLGLSAWHMEPSRMTLYRWGNTSSSSLWYELAYTEAQGRVRRGHRAWQIAFGSGFKCNSAVWRALRTIDPAKEKPAGGNPWVDEIHNFPVEVPKVESVVMSS

SEQ ID NO: 11317 - protein, 393 aa, Zea mays
MGFIGAHGVETLKRYRYSGEDRSVVAKYVLQPFWSRCVTLFPLWMPPNMITLTGFSFLVLSALLGYICSPHLDTAPPRWVHLAHGLLLFLYQTFDAVDGKQARRTSSSSPLGELFDHGCDALACAFEALALGSTLMCGGWTFCFWVVAAVPFYLATWEHFFTNTLILPTINGPTEGLMLIYVSHLFTFFTGAEWWAQDFRKSLPFFGWIPLPFLSEIEIPLYVLVLILMIVCAVIPTVRSNVSNVQEVVEARKGSMALALAMILPFIVLLAGVAIWCYLSPSSIMRNQPHLLVIGTGFNFGYLVGRMILAHLCDEPKGLKSGMFMSLVFLCFPIANALIAKINDGSPLVDELVLLLLYCAYTVGLYLHLAVSVVHEIKDALGIYCFRITRKEA

SEQ ID NO: 11318 - protein, 331 aa, Neurospora crassa
MSSVKQSAQAATSDVVDTAKNATAETVTAATDFLHTPAVRAALPFINGGLSGMVATTVIQPIDMIKVRIQLAGEGKAGGPKPTPLGVTRDIIASGKAMDLYTGLSAGLLRQAVYTTARIGCFDTFMSRLSARAKEKGQSVGFKERASAGLAAGGLAAMIGNPADLALIRMQSDGLKPVAERKNYKSVIDALGGIARNEGVAALWAGAAPTVVRAMALNFGQLAFFSEAKAQLKARTQWSSKVQTLSASAIAGFFASFFSLPFDFVKTRLQKQTRGPDGKLPYNGMVDCFAKVAKQEGVFRFYRGFGTYYVRIAPHAMVTLLVADYLGWLTK

SEQ ID NO: 11319 - protein, 321 aa, Caulobacter crescentus CB15
MGLRTPLCDLLDIEHPILLAGMGGVSYAPLAAAVSNAGGYGVLGMAGTSPDFIRAQMREVKSLTDKPFGVDLLAATPDALTASVEVIIEEGASSFVAGLGVPLPIIERLKAAGLKVMVVCGAVKHAVKAEQAGCDAVICQGGEGGGHTGLVGTLPLVAQAVEAVKIPVVAAGGLHDGRGLAAALALGAQGVWMGTRFIASHEAHAGDLYRQAVVEAADEDTVRTRCYSGKPMRVKKNPYVDDWEARPGDIQPFPQQAMVSIRNGAMGGIGGQIEGLDAAKSCFAMGQSAGGVREILPAGEIVKRLMAEAETALAKASAFRT

SEQ ID NO: 11320 - protein, 172 aa, Glycine max
MSRLMEPLVVGRVIGEVVDIFSPSVKMNVTYSTKQVANGHELMPSTIMAKPRVEIGGDDMRTAYTLIMTDPDAPSPSDPCLREHLHWMVTDIPGTTDVSFGKEIVGYESPKPVIGIHRYVFILFKQRGRQTVRPPSSRDHFNTRRVSEENGLGLPVAAVYFNAQRETAARRR

SEQ ID NO: 11321 - protein, 469 aa, Bacillus subtilis subsp. subtilis str. 168
MEQTKKWGFWLLTAFVVGNMVGSGIFSLPSSLASIASPFGATSAWLLTGAGVLMIALVFGHLSIRKPELTAGPQSYARALFSDPKKGNAAGFTMVWGYWVASWISNVAIITSLAGYLTSFFPILVDKREMFSIGGQEVTLGQLLTFAVCTILLWGTHAILVASINGASKLNFVTTLSKVLGFVFFIVAGLFVFQTSLFGHFYFPVQGENGTSIGIGGQVHNAAISTLWAFVGIESAVILSGRARSQRDVKRATITGLLIALSIYIIVTLITMGVLPHDKLVGSEKPFVDVLYAIVGNAGSVIMALLAILCLFGTMLGWILLGSEVPYQAAKAGDFPAFFAKTNKKGSPVIALIITNVMSQVFIFSVISRTISDAFTFLTTAATLAYLIPYLVSAIYSLKVVIKGETYDQLKGSRVRDGLIAILACAYSVFVIVTGTADLTTFILGIGLFFVGLIVYPFVSNKFQKEKQA

SEQ ID NO: 11322 - protein, 515 aa, Neurospora crassa
MARLLSSTRKVILQYALTALLFQSTSASQIQHRAPQVTAAPTATTAPAAVPTAISGCHLHDTEVFCMAGETEYSIHTTATATSELPAQFTGCHSHDDALFCVTPSGDDVEISRVIEESEQGHDDHDHDEDEATSSTTTSEKKCHFHAGVEHCTGGDEHEEESATCERTDRDYNIRLRVGLLFAMLATSSIGVFGPILLSNFVSPNNVFVTILRQFGTGVVISTAFIHLLSHAQLMFASECLGELSYEGTAGAISMAGIFISFLAEYLGVRVLQWHAAKTEARNIENGGERGDSAQRAEMVNILVLECGVIFHSILIGITLVVAGDTFFLTLFAVIVFHQMFEGIALGSRIAALGTLPPINAASSVHGHSHHGHSHNHAHEVKRSSLPTESTSPTGTDHGVVSEDESARVTVIKPVSLKKKLVLASGFALVTPIGMAIGIGVLKQFNGNDPSTIIAIGTLDALSAGILMWVGIVEMWAHDWMLGGEMTTASPLRTLAGLTALVAGLALMSLLGKWA

SEQ ID NO: 11323 - protein, 153 aa, Candida maltosa
MSDDIFLVTGGAGYIGSHTVIELINHGIKVVIADNLSNSSYDAVARIEFIVKQHVSHFIKVDIRNEKELNQVFSNHKISGVIHFAALKAVGESTKIPLEYYDNNVSGTIALLNVCKSNNVKTIVFSSSATVYGDVTRFGDNSMIPIPEHCPME

SEQ ID NO: 11324 - protein, 306 aa, Vibrio cholerae
MAIDSLITIAVLVLAVVIFISSAVKTVPQGNNWTVERFGRYTQTLKPGLNLIIPFIDRVGHKINMMEQVLDIPAQEVISKDNANVVIDAVCFVQVIDAAKAAYEVSQLQHAIRNLTLTNMRTVLGSMELDEMLSQRDMINTKLLSIVDHATSPWGVKVTRIEIKDVQPPADLTAAMNAQMKAERNKRAEVLEAEGVRQAQILRAEGQKQSEILKAEGEKQAAILQAEARERAAEAEAKATTMVSEAIAKGDMQAVNYFIAQGYTEALKAIGQAENGKIIMLPLEATGLMGSVAGIAEMFKSSQTTK

SEQ ID NO: 11325 - protein, 339 aa, Sphingopyxis macrogoltabida
MGSARIEILDQGEFQAEEGELLLREALRNRIGFPYDCNSGGCGSCQFELVSGGVEDAWSAAPGLSERARSRGRRLACQSRVTGDCAIKVRLKPEFVPTHPPALHSARYEGCRPLTSDMAEYRFRCDGSADFLPGQYAMLRLPGVSGDRAYSMSNLPNADGLWTFIIKHISGGQGSGVLAEKIRPGDLIGLDGPYGLSFLRPDADHDIVCIGGGSGISPLKSICSAAVRHPPLDNRTIHLFYGARTPSDLPIDRTFREDPQLAERVTVVPAISEASHGTSWSGETGMIHEVLHRWLETVGDAKRFEYYFCGPPPMIDAVRRLLQIDLRVPETQLHADSFV

SEQ ID NO: 11326 - protein, 93 aa, Glycine max
MLEGKAMVKETDMSTKMQIHAMASASQALDLYDVYDCISIAAHIKKEFDSVYGNGWQCVVGSNFGCYFTHSSGTFIYFALATLNFLIFKGTSS

SEQ ID NO: 11327 - protein, 248 aa, Bradyrhizobium japonicum USDA 110
MNKIDLNGRVAIVTGGAQGFGRAIVQRFAASGAKVAIWDFDAALAEKTAKEIGGETRVFKVDVTDTAAVEQARDATLAAFGKIDILVNNAGIAGVNKPVWETDLEEWRKVLRINLDGPFICCKAIVPEMLKQKYGRIVNIASIAGKEGNPNASHYSASKAGLIALTKSLGKELAAHDILVNAVTPAAAKTAIFDQMTQQHIDFMLSKIPKARFVQVEELAAMVSWLASEDCAFSTGAVFDISGGRATY

SEQ ID NO: 11328 - protein, 290 aa, Saccharomyces cerevisiae
TLVHVASVEKGRSYEDFQKVYNAIALKLREDDEYDNYIGYGPVLVRLAWHISGTWDKHDNTGGSYGGTYRFKKEFNDPSNAGLQNGFKFLEPIHKEFPWISSGDLFSLGGVTAVQEMQGPKIPWRCGRVDTPEDTTPDNGRLPDADKDAGYVRTFFQRLNMNDREVVALMGAHALGKTHLKNSGYEGGGANNVFTNEFYLNLLNEDWKLEKNDANNEQWDSKSGYMMLPTDYSLIQDPKYLSIVKEYANDQDKFFKDFSKAFEKLLENGITFPKDAPSPFIFKTLEEQGL

SEQ ID NO: 11329 - protein, 491 aa, Clostridium acetobutylicum
MTSKKEQKNELKRTLTARHMNMIAIGGSVGTGLFFASGSAISTAGPGGALLAYIITGILVYVLMMSLGEMSTLLPISGSFETYATRFVDPALGFTLGWNYWFSWSICVASELVAGSLIVKFWFPHTNTTIWSIGFLLVIFILNILSAKAYGESEYWFSSIKVVTIIIFIIVGVLMIFGIMGNDSPGFKNWVISGNGSRAPFVGGIAAIINVFLVAGFSFSGTEIVGLAAGETENPEENVPKAIKSVFWRILLFYICAIIIIGFLVPFNDKNLLKSGVNNIAYSPFTMVFAKCGIAFAASAMNAVILTSVLSCGNSGLYVSSRMLYSLAKEGKAPKFLAKVNKQGVPMNALYATTLVASSAFLSSLIGEGKIYYVLYNASGITALFAWLGIGICHYRFRKAYVAQGRDLKDLKFKAKFYPYGPIMAIVLCVVIIFGANIWIFQAPKFSWFDFISNYICIPIFIALYIAYKYIKKTKLVPLEECDFEYNGKDK

SEQ ID NO: 11330 - protein, 338 aa, Clostridium perfringens str. 13
MNILLTGGIGYIGSHTIVELLRDDNNSVVVIDNLVNSRKEVKDIVEKITGKSIKFYEGDLVNFEDIDKVFKNEKIDAVIHFASLKAVGESVEKPLEYYNNNIIGTLNLLTSMRNHNVKKFIFSSSATVYGESEIVPVHEGLQAGFATNPYGRCKAMIEDILRDLYISDNSWNIVLLRYFNPVGAHESGLIGELPNGIPNNLMPYVSKVADGELDYVRVFGDDYNTPDGTGVRDYIHVVDLARGHVAAMKKLKDGSGISTYNLGTGQGYSVLDIIKAFSKASGKEIPYKIVDRRAGDIAISFADPSKAEKELGWKAEKNLEDMCKDFWKWQCVGMKNFK

SEQ ID NO: 11331 - protein, 233 aa, Papaver somniferum
MAGSGSEEVKILGGWPSPFVMRPRIALNIKSVKYYLLEETFGSKSELLLKSNPIYKKIPVMIHGDKPICESMIIVQYIDDVWASAGHSIIPSDPYDASIARFWATYIDDKFFPSLMGIAKSKDAEEKKAAIEQAIAAFGILEEAYQKTSKGKDFFGEEKIGYIDIAFGCYIGWIRVTEKMNGIKLFDETKVPGLTKWAEKFCADETVKSVMPETDALMEFAKKIFGSKPPPSN

SEQ ID NO: 11332 - protein, 553 aa, Vanilla planifolia
MAAAVAIEEQKKDIIFRSKLPDIYIPKNLPLHSYCFENISKFSSRPCLINGATDEIFTYADVELISRRVGSGLSKLGIKQGDTIMILLPNSPEFVFAFLGASFIGSISTMANPFFTSTEVIKQAKASNAKLIITQGCYVDKVKDYACENGVKIISIDTTTTADDAANILHFSELTGADENEMPKVEISPDGVVALPYSSGTTGLPKGVMLTHKGLVTSVAQQVDGENPNLYMHSDDVLLCVLPLFHIYSLNSVLLCGLRAGSGILIMQKFEIVPFLELIQKYKVTIGPFVPPIVLAIAKSTVVDNYDLSSVRTVMSGAAPLGKELEDAVRAKFPNAKLGQGYGMTEAGPVLAMCLAFAKEPFDIKSGACGTVVRNAEMKIVDPETGSSLPRNHPGEICIRGDQIMKGYLNDPEATARTIDKEGWLHTGDIGYIDDDDELFIVDRLKELIKYKGFQVAPAELEALLLTHPCISDAAVVPMKDEAAGEVPVAFVVKSNGHNITEDEIKQFISKQVIFYKRINRVFFVEAIPKAPSGKILRKDLRARLAAAALPTN

SEQ ID NO: 11333 - protein, 222 aa, Zea mays
MAAAAEVVLLDFWVSPFGQRCRIALAEKGVAYEYREQDLLNKGELLLRSNPIHKKIPVLLHAGRPVCESLVILQYIDEARPDVAPLLPKDDPYARAQARFWADYIDKKIYDSQTRLWKFEGEAREQAKKDLVEVLETLEGELADKPFFGGGALGFVDVALVPFTSWFLAYEKLGGFSIQEHCPRIVAWAARCRERESVAKAMSDPAKVLEFVQFLQSKFGGK

SEQ ID NO: 11334 - protein, 194 aa, Ceratopteris richardii
NQGHRKHPSKDVTKDIGDGDELMCGVEKKRRLTAEQVNFLETSFSMDLKLEPERKAHLAKQLGIQPRQVAIWFQNRRARWKNQQIEQDYESLKASYEAVVEEKERLLKEHDLALEANKRLQAEVCFKHAMSLLWSGYEESHVNIYSMTDSITNAYFHCLTRRHSSLILLHFSSQHTLIGFGGICDAWSPTFRYI

SEQ ID NO: 11335 - protein, 463 aa, Yersinia pestis CO92
MELPVKNKLKRGLTTRHIRFIALGSAIGTGLFYGSADAIRMAGPSVLLAYLIGGVVAFVIMRALGEMSVNNPQASSFSRYAQDCLGPMAGYITGWTYCFEILIVAIADVTAFGIYMGLWFPDVAHWVWVLSVVLIIGAVNMMSVKVFGELEFWFSFFKVATIIIMILAGIGIIVWGIGNGGQPTGIHNLWTNGGFFSNGFVGMLLSLQLVMFAYGGIEIIGITAGEAEDPKKSIPKAINSVPWRILVFYVGTLFVIMSIYPWNQVGTNGSPFVLTFQHMGITIAAGILNFVVITASVSAINSDVFGVGRMLNGMAEQGHAPKAFTAISKRGVPWVTVLVMMCAMLIAVYLNYIMPENVFLVIASLATFATVWVWIMILFSQIAFRRSLSKDQVKALDFPLRGGTFTSVLAIIFLVFIIGLIGWFPTTRISLYVGLVWIVLLLVGYYFKVKYQKKQATLIKNAD

SEQ ID NO: 11336 - protein, 417 aa, Orychophragmus violaceus
YHHSFTFFLLVIFVLFRHVISINTLSPNEALTISSNQTIASPNDVFELGFFKTTSSRDGTDRWYLGIWYKTTSKRTYLWIANRDNPLYNPNGTLKFSHANLVLLTYFDIPVWSTNLTTTFKSPVVAELLDNGNFVLKDSKTKDSNRFLWQSFDFPVDTLLPEMKIGRNLKTGNDRYLTSWKSPTDPSSGDHSFKLETKGLPEFYLWQEDFIKYRSGPWNGIQFNGIPAMQNWSHIINSLIENREEVVYTFQDLNQNIHSRFRISSGGSLQVITWTSTVPQRNMFWSLVEDECDIYNRCGPYAYCDMNTRPTCNCISGFLPKNATAWASGDMSYGCVRKTLLSCGKGDRFLKLRQMKLPETSGAIVDKRIGLKECEERCVRDCNCTGFANTDVWNGGSGCVIWTGEAGELIDMRNNVV

SEQ ID NO: 11337 - protein, 253 aa, Triticum aestivum
PLLFYDNNLIGTITLLQVMAAHGCNKLVFSSSATAYGWPKEVPCTEEFPLSATNPYGRTKLVIEDICRDLQRSDPDWKIILLRYFNPVGAHPSGYIGEDPLGVPNNLMPYVQQVAVGRRPALTVYGTDYNSKDGTGVRDYIHVVDLADGHIAALRKLSEDSVRIGCEVYNLGTGKGTSVLEMVAAFEKACGKKIPLVYAGRRAGDAETVYAATAKAEKELKWKAKYGVEEMCRDLWNWASKNPYGYGSTDNGH

SEQ ID NO: 11338 - protein, 148 aa, Glycine max
MATVEEKPLMVVGVDESEQSTYALELTLDRFFAPYAPNFPFKLLIIHAKPNAVSAVGFAGPGIVEVVPHVDADLKHTAAKVVEKAKGICESKSVHDATMEVFEGDARNILCEVVDKHHASLLVVGSHGHGAIKRAVIGSVSDYCAHHA

SEQ ID NO: 11339 - protein, 349 aa, Chlamydia muridarum
MQTAEKLMFPLLIDCQKAAETVVMQAMLALMRYRQSRTFIPSWEKPDQTHVTPADYAIQYYFHQTLTSLFPHIPLVGEETLNPDTDHHKIPQILNFAKQLDPQVSCQNLYKALSSQNSHSSLFWLTDPIDGTSGFIKQRYFAVALSLFYEHSPILSVIANPTSNNASFKMYSAAKGEGLTIYTPTRSILFSLQEDFQLTHQFCEASLAARNHQHLTTHILSQHLPWHPRPVRADSQSKYAWVADNTVDFFIRIPYSPPRAHYRDHAPGVFLIEEAGGLVTDISGSPLTFSNPNLYLEKHPLILASANERIHNTILETLYRLRHRSTLNRLSPEEQSSFTKNKQLSALQL

SEQ ID NO: 11340 - protein, 178 aa, Glycine max
MIRLNVYCSLIPSARQARPGSSYGSLIIHNHKASKFSHRISIKAKAIKDEMDGETSGSSGRSWDPGLEIEVPFEQRPVNEYSSLKDGILYSWGELGPGSFFLRLGGLWLAVFTVLGGPIAAASFNPSKEPLRFILAGGTGTLFIVSLIVLRIYLVRSKFQSSFCSSCHGHFITGDRGG

SEQ ID NO: 11341 - protein, 854 aa, Brassica rapa
MKRVQNIYHHSYTSFLLVFLVLILFHPALSIYVNTMSSSESLTISSNRTLVSPGGVFELGFFKTLERSRWYLGIWYKKVPWKTYAWVANRDNPLSNSIGTLKISGNNLVLLGQSNNTVWSTNFTRGNARSPVIAELLPNGNFVMRHSNNKDSNGFLWQSFDFPTDTLLPEMKLGYNLKTGRNRFLTSWKSSDDPSSGNFAYKLDLRRGLPEFILINTFLNQRVETQRSGPWNGMEFSGIPEVQGLNYMVYNYTENSEEISYSFHMTNQSIYSRLTVSELTLNRFTWIPPSSAWSLFWTLPTDVCDPLYLCGSYSYCDLITSPNCNCIRGFVPKNPQQWDLRDGTQGCVRTTQMSCSGDGFLRLNNMNLPDTKTATVDRTIDVKKCEERCLSDCNCTSFAAADVRNGGLGCVFWTGELVAIRKFAVGGQDLYVRLNAADLDLSSGEKRDRTGKIIGWSIGVSVMLILSVIVFCFWRRKHKQAKADATPIVGNQVLMNEVVLPRKKRNFSGEDEVENLELPLMEFEAVVTATEHFSDFNKVGKGGFGVVYKGRLVDGQEIAVKRLSEMSAQGTDEFMNEVRLIAKLQHNNLVRLLGCCVYEGEKILIYEYLENLSLDSHLFDGSRSCKLNWQMRFDIINGIARGLLYLHQDSRFRIIHRDLKASNVLLDKDMTPKISDFGMARIFGRDETEADTRKVVGTYGYMSPEYAMNGTFSMKSDVFSFGVLLLEIISGKRNKGFCDSDSSLNLLGCVWRNWKEGQGLEIVDRVIIDSSSPTFRPSEISRCLQIGLLCVQERVEDRPMMSSVVLMLGSEAALIPQPKQPGYCVSGSSLETYSRRDDENWTVNQITMSIIDAR

SEQ ID NO: 11342 - protein, 489 aa, Glycine max
  unsure (1)..(489): unsure at all Xaa locations
MLDLNLNADSASDAQMESSGSFNSSVVNAADTDDSCSYGDAVAYNFAILNTTTTATSDGPPLAAAGESSVRTIQLFPAVESGASPAWLDFSSKVDQNGAPQEQRIPPRQPPVKKSRRGPRSRSSQYRGVTFYRRTGRWESHIWDCGKQVYLGEDATQVEDSFYANCFSFLXYRFLFLYFLLGGFDTAHAAARAYDRAAIKFRGVDADINFNVSDYDEDIKQMSNFTKEEFVHILRRQSTGFSRGSSKYRGVTLHKCGRWEARMGQFLGKKYIYLGLFDSELEAARAYDKAAIKCNGREAVTNFEPSFYEGEVISQSDNEDNKQSLDLNLGLAPPSYSDGQIKNTPSNGSGMITPHSWDNIPLDKRVMFEHSASRSLTVQPSHHGFSVASGQHPSVWNGSNFFPIYEETAIEKRMEAAPVPNWAWQVQGPYGRATLAPPFSTAASSGFPSTIIPSAADTQIRFPNMTFLHSHFPSSITNSGTISPFFFGS

SEQ ID NO: 11343 - protein, 497 aa, Salmonella enterica subsp. enterica serovar Typhi
MKTQTTHAAEQHAAKRRWLNAHEEGYHKAMGNRQVQMIAIGGAIGTGLFLGAGARLQMAGPALALVYLICGIFSFFILRALGELVLHRPSSGSFVSYAREFLGEKAAYVAGWMYFINWAMTGIVDITAVALYMHYWGAFGDVPQWVFALGALTIVGTMNMIGVKWFAEMEFWFALIKVLAIVIFLVVGTIFLGTGQPLEGNATGFHLITDNGGFFPHGLLPALVLIQGVVFAFASIELVGTAAGECKDPQTMVPKAINSVIWRIGLFYVGSVVLLVLLLPWNAYQAGQSPFVTFFSKLGVPYIGSIMNIVVLTAALSSLNSGLYCTGRILRSMSMGGSAPKFMAKMSRQHVPYAGILATLVVYVVGVFLNYLVPSRVFEIVLNFASLGIIASWAFIMVCQMRLRQAIKEGKAADVSFKLPGAPFTSWLTLLFLLSVLVLMAFDYPNGTYTIASLPLIAILLVAGWFGVRRRVAEIHRTAPVTADSTESVVLKEEAAT

SEQ ID NO: 11344 - protein, 517 aa, Blumeria graminis
MSESIGPTRTLKRKNVKGLALSAPPRIVAPSDGDSQQPGGIGGENTRQTSQLEIGIEYKLDLKREDLEVLKDLGHGNGGTVSKVRHMATGTVMARKIIHVEANKEMRRRIVRELQIMHETNSEYIVTFYGAFLSETNDVIMCMEYMDVGALDRVSRKFGPVRVDVLGKIAEATLGGLTYLYTKHHIMHRDIKPSIILINSKGQIKLCDFGVSGELVNSVADTFVGTSTYMAPERIQGQKYTVKSDVWSFGLSIMELAIGKFPFDTSEQLSDDEGAPAGILDLLQQIVYEPAPRLPKSEAFPQILEDMIQKCMAKEPQERPTPQELYEREPFVQAAKRTPVNLKEWAVGLMEKDNRKSHLGPQLSPSTQQLLRSCDSPTAMRLNSPNNALPTPTSGDIPIGGDVRSAATSPTHEDSTNHSRLSTKLSSSQSRSHSGSSSQNSRHVSNNSATLAIPDRQSNIPSGKGVVFTSTKLPIRPAPSGPLPPPPVPRKEGTESDLRNLNRRQATFGNNGYGPGF

SEQ ID NO: 11345 - protein, 349 aa, Schizosaccharomyces pombe
MVSNNAVIIKKYLDSTAGYPVIGEHLAFEKREFDLENAQVDEETPVLLKNIYTSVDPYLRMRMQSPKHASYIPPLELGKPFYNSTVAKVVKSTLDQYKPGMDVVFVSGWEEYTFVSKQALGFLQPINNPYKLPLIDFVGSLGMPSQTAYCGLKHIGKPKAGETIYISAASGAVGQMAGQLAKAMGLHVVGSVGSDEKFKICLDSGYDSVFNYKKESPFKALPRLCPKGIDIYFENVGGETMDAVLENMNLQGRIIFCGAISQYNNPNPYRVKNLGMVLVKSLTIQGFIVANILPQYQEQYFEEMPKLIAEGKIKYKCDVYDGLESAPEAFIGMLQGKNSGKTIVKIADE

SEQ ID NO: 11346 - protein, 318 aa, Vibrio vulnificus CMCP6
MSRATMNKPFSIAIHGGAGTILRSQMSDELKEAILSDLQHAVRAGYQLLEQGADALDAVVAAAKVLEDSPNFNAGKGSVLTHNEMVEMDASVMHGRELKAGAVAGVRHIKNPIELARDVMQNSAHVLLIGEGAEKFAFEQGQQYTEQDYFFTDRRYEQLLSMREKGLFALSEAKYPDDKKHGTVGAVALDQQGNLAAATSTGGVTNKKYGRVGDSALIGCGTVAKNGVVAVSTTGVGEFFIRKRVAEDVAARMRYLNEDVHTACEQIIHGELKSMGGEGGLIAVDAQGDIHFAMNSSGMYRAAINTQGELCVKIYADE

SEQ ID NO: 11347 - protein, 214 aa, Paeonia peregrina
IVESVGKGVTDVKPGDHVLPIFTGEYKECRHCKSEESNMCDLLRINTDRGVMLNDGKSRFSINGQPIFHFVGTSTFSEYTVLHFGCLAKINPEAPLDKVCVLSRGISTGLGATLNVAKPKKGSIVAIFGLGAVGLAAAEGARIAGASRIIGVDLNPKRFDEARKFGVTEFVNPKDYNKPVQEVIAEMTGGGVDRSVECTGSIMAMMSAFECVHD

SEQ ID NO: 11348 - protein, 489 aa, Zea mays
  unsure (1)..(489): unsure at all Xaa locations
AQRDQLRQPVAFASSNAKQSLYPDVDQSHPDLNTPFFSAPTTSTCAGAGAATGNSLYPTVDPNELAQNLFPETVEEDAAPPPPTTEETIIAVPGAQLHLIDPDRSVDLGAGTLSIVRLRQGDHSVAVLARLIHEKPHHRRGLFRLFSSGRSDAGAEQEPVQWPLARDXSPAVKLDPAHYFFSLHVPHTDHPGRHXDDADGAEADAEAALSYGLTVVGKGQEEVLAEXDRVLEEYTTFSVKQVETAAKEKSEVMDARAVAEITPEEAVGDKKEVVEEKSAAFWTTIAPNVDDYSSSVARLIARGSGQLVRGIIWCGDITAGGLRRGEEVMKKSVGPSTKPTQVKPSTLRRMKRARRVTKMSNRVANSILSGVLKVTGFVTSTVLNSKPAQKFFKLMPGEVILASLDGFGKIWDAVEVSGKNVMQTSSVVTTSVVTHRYGEQAGEATHNYLHATGNVLGAAWAVFKIRKALDPKGNMKKSSFVSPSSARRS

SEQ ID NO: 11349 - protein, 196 aa, Escherichia coli K12
MPIYQIDGLTPVVPEESFVHPTAVLIGDVILGKGVYVGPNASLRGDFGRIVVKDGANIQDNCVMHGFPEQDTVVGEDGHIGHSAILHGCIIRRNALVGMNAVVMDGAVIGENSIVGASAFVKAKAEMPANYLIVGSPAKAIRELSEQELAWKKQGTHEYQVLVTRCKQTLHQVEPLREIEPGRKRLVFDENLRPKQ

SEQ ID NO: 11350 - protein, 449 aa, Thermoplasma volcanium
MMQEELNGIKIKVTPPGPEAKKIIELNDKYLARSTQSLPVVGKLGKGVYVEDVDGNVYLDFASGISVTNLGHLDPYVTQKVEEQLHKLWHFPGTDFYTEMQVLAAKSLIEVTPGKFNKKVFFTNSGTESVEAAIKIAKSYTHRERFIGFIGAFHGRTQGSLSFTASKPIHHKGFFPSMPGVEHVPFPNPYRNPFNIDGYEEPDELVNRVIDYIETYLLKTYVPPEDVAGILAEPIQGEGGYIVPPMNFFKELRKLADKYHIPLLIDEVQSGFGRTGKFFASEHFGVEPDVITLAKSIASGIPMGAAVMKEEMNFSENGLHSNTFGGNLIASAACVATIDEMKKLNAVENAAKQGAYMKKRLVELQNKYNEIGDVRGLGLMLAIDFVKDRRTKEPNSKLRNDVINNAFKNGLILLSTGSSAIRIIPPLIITQEQVDEGIEVLDKAIKMSK

SEQ ID NO: 11351 - protein, 547 aa, Oryza sativa
  unsure (1)..(547): unsure at all Xaa locations
MPPHSAAKSATTRPHSRVQTAWTRSAPRPPPPSLFSPIFGDGIEPTSSTSAPPLCRPLPVDSAPIGHDLRIRSYKISPRAPLERHLHRRPTGAAAISTVGPPCAAARCHRALAPLPPSFPPRFPLLPPAPAATLVVAASRSVGRLTPLLLTRGRSIHLDESGPSTLLASAAPVFVRVFPHFAFQRVDSAVSEDRNREERVQKIILKKQGKKPFHIFPTLQLLLLNVTGRTNFGFCPVLQKIGWFNWFSPVRLLANLLAGLDWPTPWFRFFWSDRQSGLVLITIAAVLSTSSSWNTTPQSSDKAEDQQQQQQYALVVVAAKSRAAAGSSIEGTSPHPPTIIEEEEGGTTMSSRRRGARRGTGGSRXDDYEQQQARVLMALMQGFCAARYRKADNIPCPIVQGLYLGSVGAAMNKDALKSLNITHILIVARSLNPAFAAEFNYKKIEVLDSPDIDLESHFDECFSFIDESISSGGNVLVHCFAGRSRSVTIIVAYLMKKHQMSLENALSLVRSKRPQVAPNEGFMSQLENFEKSMQVEQERKLMQPVQN

SEQ ID NO: 11352 - protein, 95 aa, Oxalis subintegra
  unsure (1)..(95): unsure at all Xaa locations
LYAGINISGTNGEVMPGQWEYQVGPSVGIEAGDHIWASRYILERITEQAGVVLTLDPKPIDGDWNGAGCHTNYSTKSMRDEGGFEVIKXAILNLS

SEQ ID NO: 11353 - protein, 96 aa, Zea diploperennis
MGRRACCEKEGVKRGAWTTKEDDALAAYVKAHGEGKWREVPQKAGLRRCGKSCRLRWLNYLRPNIRRGNISYDEEDLIIRLHKLLGNRWSLIAGRL

SEQ ID NO: 11354 - protein, 581 aa, Zea mays subsp. mays
MKREYQDAGGSGGDMGSSKDKMMAAAAGAGEQEEEDVDELLAALGYKVRSSDMADVAQKLEQLEMAMGMGGVGGAGATADDGFVSHLATDTVHYNPSDLSSWVESMLSELNAPPAPLPPATPAPRLASTSSTVTSGAAAGAGYFDLPPAVDSSSSTYALKPIPSPVAAPSADPSTDSAREPKRMRTGGGSTSSSSSSSSSMDGGRTRSSVVEAAPPATQASAAANGPAVPVVVVDTQEAGIRLVHALLACAEAVQQENFSAAEALVKQIPMLASSQGGAMRKVAAYFGEALARRVYRFRPPPDSSLLDAAFADLLHAHFYESCPYLKFAHFTANQAILEAFAGCRRVHVVDFGIKQGMQWPALLQALALRPGGPPSFRLTGVGPPQPDETDALQQVGWKLAQFAHTIRVDFQYRGLVAATLADLEPFMLQPEGDDTDDEPEVIAVNSVFELHRLLAQPGALEKVLGTVRAVRPRIVTVVEQEANHNSGTFLDRFTESLHYYSTMFDSLEGAGAGSGQSTDASPAAAGGTDQVKSEVYLGRQICNVVACEGAERTERHETLGQWRSRLGGSGFAPVHLGSNA

SEQ ID NO: 11355 - protein, 346 aa, Mesorhizobium loti
MKTIFSPIQLKHQGQFEFYNGAVVEGYENTSRATFITSRIEEVRLGPVLNPRPQSLDTAKRIHSPTYLDFIASAWRLWRDAGRTGTALPYAWPARGRYKDVAPDSIDAQLGQYSIDASTGFVEGTWEAVKASHDSALTAADLIIEGEQACFALCRPPGHHAGTDFNGGYCFVNNAAVAAQRLLDGGASRVTILDIDYHHGNGTQEIFYARGDVQVVSLHADPRNDYPFFAGYADERGSGSGEGFNINIPLPHGTDWAQWEGALDFALGSVRQFGPDVVVISHGVDTFEGDPISRFRLSHDHFPLIGARLAGLQTKTLFVLEGGYAVEDVGINVVGVLSGYEDAIRR

SEQ ID NO: 11356 - protein, 190 aa, Synechocystis sp. PCC 6803
MPGGINPHSKLCKQALKGVMDANFPIYLTPPDLSPAAFVAANATVVGKVHLGKDCSIWYGAVVRADLEAIIIGEGTNIQDGAILHGDPGIVTVLEDWVTVGHRAVVHAAHIERGSLIGIGATILDNVRIGAGSIIGAGAVVTKDVPPRSLVMGVPAKIIKQVSEGQVQGLLDHGQNYVRLAKAHAAAGLG

SEQ ID NO: 11357 - protein, 652 aa, Oryza sativa (japonica cultivar-group)
MPSRMMQAFAQEASDFDRQMGCMAGMFQIFDRRRLLTARQRGGARGTAPPGHVLPNSNSNVSIQNPVASNNTLDKTFSKSMTENSSLSMESSRASSSSSSCSSFSSTDINRPIQQELSYINKERFAGKPPRSSQTKSVKCSKTEAKTKDPHTGFRDIVKESINRETHGMTIKTSTKESRKGLHKDSPRPLLISKSTDGTYVIGIDRSTGVPGYVHESSRPPRFSCDDRQLLRSVEAQDSKKPSAKLKELPRLSLDSRKESMNPCSRLKNSGYIRTDDNLLDVLKHQESPSHQRASSVVAKLMGLEGTTPDIHETARSPTPVHGTQIDQPSHCQRIKNQDHSVPVQKNHSPVLKTNPSPRIIPEAAPWRQNERAVTGRAAEVKPRTASIYADIQRRLRGLELSECNKELRALRILSTLHKKDGPSQSDNNPELTAIQKKASEQIVDSENFQSPIVIMKPARCITKPDASDTLVAPLSRPKGIRRLRHEETSFTRKNENSDSKRNHSPNESAHSSGEEPVNSARSPRLSSSLSPRLAQKKADSERRSRPPVLPTSPGKKSKETVSPRGRLRSRHSQTKSNSDNDNVLHIPETKINLAKQIDVGVVDHPNPLNANSPYIHQSKIASTPNREVQKINCSTTSKDLTVMKTLSGSNN

SEQ ID NO: 11358 - protein, 435 aa, Brassica rapa
MKGVRKTYDNSYTLSFLLVFFVLILFRRAFSVNTLSSTESLTISNNRTLVSPGDVFELGFFRTNSSSPWYLGIWYKKLSERTYVWVANRDNPLSNSIGSLKILGNNLVLLGHSNKSVWSTNVSRGYERSPVVAELLANGNFVMRDSSNNNASQFLWQSFNYPTDTLLPEMKLGYDLKTGLNRFLTSWRSYDDPSSGDFLYKLETRRLPEFYLMQGDVREHRSGPWNGIQFIGIPEDQKSSYMMYNFTENSEEVAYTFLMTNNSFYSRLTINSEGYLERLTWAPSSVVWNVFWSSPIHQCDMYRTCGPYSYCDVNTSPVCNCIQGFRPKNRQQWDLRIPTSGCIRRTRLGCSGDGFTRMKNMKLPETTMAIVDRSIGLKECEKRCLSDCNCTAFANADIRNRGTGCVIWTGELEDIRTYFADGQDLYVRLAAADLV

SEQ ID NO: 11359 - protein, 175 aa, Desulfitobacterium hafniense
MLKSFPLLSMKPVLYAANVSEEEIAQPDNNPYVRKVREIAAAENSEVVVVCAKIEAEIAELEEEEKKVFLEDLGLTESGLDRLIRAAFHLLGLMTYFTAGQIEVRAWEIRRGMKAPQAAGVIHTDFERGFIRAEVVAYKDFVENGGLNGAKEKGLVRLEGKEYVMNDGDIVHFRF

SEQ ID NO: 11360 - protein, 176 aa, Zea mays
MAAEGEKKMITLKSSDGEEFEVEEAVAMESQTIRHMIEDDCADNGIPLPNVNSKILSQGIEYWNKHVHGGAAAAAGSKGGSHDVGGASAKRNGGSGGDLQNWDGDFVKGDQGTLFHLLLGGNYLNIKGLVDLTWQNGGGMVQGKTPEEIRKNFHIQNGFTPEEEEEIRRENQWAFQ

SEQ ID NO: 11361 - protein, 500 aa, Solanum chacoense
MQLVSIFLFISFLFLLRKWKKYLNNSQTKKLPPGPWKLPFIGGMHHLAGGLPHRVLRDLAEKYGPLMHLQLGEVSAVVVTSPEMAKQVLKTHDIAFASRPKLLAMDIICYNRRDIAFSPYGDYWRQMRKICIMEVLSAKSVRSFSSIRHDEVVRLIDSIQPCFTSGELVNFTERIIWFTSSMTCRSAFGQVLKEQEVFIKLIREVISLAEGFDVADIFPSYKFLHGFGGAKQKLLNAHRKVDSIVEDVIKEHKKNLATRKSDDAIGGEDLVDALVRLMNDKSLQFPINNDNIKAVIIDLFAAGTETSSTTTVWAMAEMLKNPSVFAKAQAKVREAFRDKVTFDENDVEELKYLKLVIKETMRLHAPVPLLVPRECREETEINGYTIPVKTKVMVNVWALGRDPKYWDDAESFKPERFEQCSIDFIGNNFEYLPFGGGRRICPGISFGLANVYLPLAQLLYHFDWKLPTGMEPKDLDLTESAGITAARKGDLYLIATPHQP

SEQ ID NO: 11362 - protein, 308 aa, Streptomyces avermitilis MA-4680
MQHPIALAPMGGSAGGALAAAVSRGGGLGMLGAGGGDREWLARELPLVAQAGGRPWGIGFQTWAIDRSTVERALEHTPRAVMLSFGDPSPFAECVRAAGAVLIVQVTDLDEARQAVDLGADVIVAQGTESGGHGARQGRSTLPFVPVVVDLAAPVPVLAAGGIADGRGVAAALALGAAGALVGTRFQATTEALVDPSTAKAIVEGHGGDTERNRVLDIARGSRWPSKYTARTLGHPYLDRWRGREAELAGDPRARQDYQRDVAQGNIPSLPVWAGEAIDLIKDLPSAADLVATLAAQAEDALTRAGRR

SEQ ID NO: 11363 - protein, 159 aa, Triticum aestivum
  unsure (1)..(159): unsure at all Xaa locations
MPPPALCATSAARLRLLLPSAPSALFLRAAAASAALAPAKQRLLFSTTATTAGMAAAAGAKASTQPAAAGGGVSERIMPHLLNIYGSCATARDFEMYAPNATFEDPLMRAHGVKQVKSSLXTKCPKVFGESKYSGTSRKSRTATPTAGESPILSPRQIH

SEQ ID NO: 11364 - protein, 106 aa, Lupinus luteus
MVLAIDEHEHSSYALGWTLDRFFTPFGSDAPFKLVLVNAKSSPPVAVSMAGPGALGTEFFPSVEVQLKQLADQITEKARQICASKLVNEVEVEVIEVMVEMCCVML

SEQ ID NO: 11365 - protein, 151 aa, Photobacterium leiognathi
QDLTVKMTDLQTGKPVGTIELSQNKYGVVFIPELADLTPGMHGFHIHQNGSCASSEKDGKVVLGGAAGGHYDPEHTNKHGFPYTDDNHKGDLPALFVSANGLATNPVLAPRLTLKELKGHAIMIHAGGDNHSDMPKALGGGGARVACGVIQ

SEQ ID NO: 11366 - protein, 201 aa, Triticum aestivum
LPPAGAKPGPVVYWMLRDQRLADNWALLHAASLAAASAAPLAVAFSLFPKPFLLSARRRQLGFLLRGLRRLAADAATRRIPFFLLTGGPMEIPALVQRLGASALVADFSPLRPVREALDAVVGALCRDAASVAVHQVDAHNVVPVWAASGKLEYSAKTFRSKMNNVLDEYLVDFPEFAEVVPWDRDQPKDIDWDTLIDTVC

SEQ ID NO: 11367 - protein, 304 aa, Streptococcus agalactiae NEM316
MLQNIGQTGIQATRIALGCMRMSDLEGKQAEEVVGTALDLGINFFDHADIYGGGLSELRFRDAIKHLNVNRDKMIIQSKCGIREGYFDFSKEYILSSVDGILERLGTEYLDFLILHRPDVLVEPEEVAEAFTKLRAEGKVKHFGVSNQNRFQMELLQSYLDEPLAVNQLQLSPAHTPMFDAGLNVNMLNKASIEHDDGIVDYCRLKRVTIQAWSPFQIDLSRGLFVNHPDYKELNETIAKLAKNYNVSSEAIVIAWILRHPAQIQAIVGSMNPSRLKAIDKANDIALTREEWYDIYRSAGNILP

SEQ ID NO: 11368 - protein, 452 aa, Sinorhizobium meliloti
MTEHSLNVAMEAASKKKMNLVQLTFIVAVNMMGSGIIMLPANMAQVGAISLLSWLVTAVGSMAIAYGFAQAGLFNQRPGGMSAYAEDAYGKPGYFLVFLLYFLSLAVGNVAIGISAVGYLAGFFPWLTSTPIATCVSLIILLWLTTVANFGGPRVTGRIGSITVWGVILPVGLLCIIGWAWFSSEVFAAAWNPNGLTLVQGMGSSISLTLWAFLGMESAAQNSDAVENPKRDVPLACLFGTLGAAIIYILSTTVIQGIVPNAELAASTGPFALAFATMFNPAIGSVVMALAVLACVGSLLGWQFTIAQTARAAADERMFPSLFSRVNEMGAPVTGMIVMGVVQSLLALMTISPTLNEQFAALVNLAVVTNVLPYIISLSALFVMMRAAGVSESKFRLNSSIAIVGMLYSVFAIYASGKDAVLGGMLVTGIAFIIYGLIAPRFTPRPGIVRTA

SEQ ID NO: 11369 - protein, 357 aa, Chlamydomonas reinhardtii
MAAANQKPGPAGRPEPLIGHPRYEKIKDLNSGTFGFVQLARDKLTGETWAVKFIERGDKITKYVEREIINHRCLVHPHIVQFREVFLTPTHLCIVMEFAPGGDMFEYVVRKNGLREDEARWFFQQLIVGLDYCHRMGVVNRDIKLENTLLDSSPRPLVKICDFGYSKHEKFQSAPGSRVGTPAYLAPEVILTTKGKTYDGKIADIWSCGVMLYVMLVGAYPFERPEDKHDNQKLQKMIQRILHVDYHIPPHVRASEDCKDLLAKILVADPHKRITVDGIYNHKWYLKGLPPGVREMNDRVQPPPEGLQSVEEIKRLIEEARHVGVGAPGYVNPVETDEYIDDAMDNMYDEGSLDYND

SEQ ID NO: 11370 - protein, 459 aa, Magnetospirillum magnetotacticum
MPTRASNRTITEKDVDSVLHPYTNLKRHPEVGPLVITRGKGVRVYDEAGKDYIEGLAGLWCTSLGWGEERLVEAAARQMRTLPFYHLFSHKTHDVGVELCARLLEMAPVPMSKVFLAGSGSEANDTAIKLIHYRSNALGLPHKKKIIAREKAYHGVTVATASLTGLVNNQRSFDLPIPGVLRAGCPHHYRFARQGESEEDFSSRLAAELEALILAEGPDTVAAFFAEPVMGAGGVIVPPAGYFPKIQAVLDRYDILLVVDEVICGFGRTGKMFGTETFGIRPDMMTLAKGLSSGYAPISALMVNERVYGPVAEESGRIGVFGHGYTYGGHPVSAAVALETLNIYAERDILAHIAKVGPVLQEGLGSFRDHPLVGEARGIGLIGALELVADKTSRAPFPPERTMGAKVVARAQDKGVILRAMGDAIAFAPPLIITEAEIGDMLRRFKAALDEAHGALGLG

SEQ ID NO: 11371 - protein, 331 aa, Zea mays
  unsure (1)..(331): unsure at all Xaa locations
MADWGVQAIVSWLLSSSFHDEDISIIAEEDDETLSSSDGVTLLESVVEAVNGCLVEAPNYGLRSPEKELRAHDVIQAIRKCSSTGGPKGRFWVLDPVDGTLGFVRGDQYAIALALIEDGEVILGVLGCPNYPMKKEWLNYHQKYYRLMSKAAPPPLGSWHXGCVMYAXEGCGQAWMXPLVHDFGKLNWHHPREIQVSSISDPISATFCERVEKANSSHSFTAGLAQSVGLRNQPLRVYSMVKYAAIARGDAEIFMKFARAGYKEKIWDHAAGVVIIQEAGGVVTDAGGRPLDFSRGVYLEGLDRGIIACSGALLHQRILNAVDASWNSSTL

SEQ ID NO: 11372 - protein, 334 aa, Streptomyces avermitilis
MTTVALKPATMAQALTRALRDAMAADPAVHVMGEDVGTLGGVFRVTDGLAKEFGEDRCTDTPLAEAGILGTAVGMAMYGLRPVVEMQFDAFAYPAFEQLISHVARDAQRTRGAMPLPITIRVPYGGGIGGVEHHSDSSEAYYMATPGLHVVTPATVADAYGLLRAAIASDDPVVFLEPKRLYWSKDSWNPDEPGTVEPIGRAVVRRSGRSATLITYGPSLPVCLEAAEAARAEGWDLEVVDLRSLVPFDDETVVRVGARTGRAVVVHESGGYGGPGGEIAAGITERCFHHLEAPVLRVAGFDIPYPPPMLERHHLPGVDRILDAVGRLQWEAGS

SEQ ID NO: 11373 - protein, 287 aa, Prochlorococcus marinus subsp. marinus str. CCMP1375
MSTQIIQWYPGHIAKAEQQLSKSLEKVDLVVEVRDARIPLATGHPCLHKWIRNKKHLLVINRRDMISQKAFNSWDNWFKENGQEAWWCNAKDGNGTNKIKEAAIKLGNDLNNRRESRGMRKRAVRALILGFPNVGKSALINRLVNKKVVKSARRAGVTKSLQWVRVGQQLDLLDAPGVLPPQLEDQEAAVKLALCDDIGQASYDVESVAIKFLNILNQVKNESDFETSNQILEKRYGISWEESNNNVHLWLENAANYHTSGNTNRMSQRLLDDFRKRLIGTISLELP

SEQ ID NO: 11374 - protein, 277 aa, Pseudomonas syringae pv. syringae B728a
MVSTSPAQVGVEPCLARMSAIAARLSARICSIAGLTCSARIAEKGGRSYDCRRGLFALTVLHLALKKHSAILITIDADRSNQTRSTRLSLPKKEPIVAIRKFQEHTPALGERAFVDHSAVVIGDVEIGADSSVWPLTVVRGDMHRIRIGARTSVQDGSVLHITHAGPFNPDGFPLLIGDEVTIGHKAMLHGCTIGNRILVGMGTTIMDGAVVEDEVIIGAGSLVPPGKVLESGFLYVGRPVKQVRALTEKEIAFFPYSATNYVKLKDQHLAEGFDKG

SEQ ID NO: 11375 - protein, 343 aa, Sorghum bicolor
MGFIGAHGVETLKRYRYSGEDRSVVAKYVLQPFWSRCVTLFPLWMPKWLCFPTFQITLTGFSFLVLSALLGYIYSPRLDTAPPRWVHLAHGLLLFLYQTFDAVDGKQARRTSSSSPLGELFDHGCDALACAFEALALGSTLMCGGWTFWFWVVAAVPFYLATWEHFFTNTLILPTINGPTEGLMLIYVSHLFTFLTGAEWWAQDFRKSLPFLGWIPLPFLSEIKIPLYVLVLILMIVCAVIPTVRSNVSNVQEVVETRKGSMALALAMILPFITLLAGVAIWSYLSPSSIMRNQPHLLVIGTGFNFGYLVGRMILAHLCDEPKGLKSGMFMVNLSIQFHTCIL

SEQ ID NO: 11376 - protein, 247 aa, Solanum demissum
MDSKGAAPNQTYEDFVPTTELVQEQDSDTLLIDLTGFKKEQVRIQLTRTGVLKISGQRPVAESKWLRFQKDFPVSQNCDKTKISAKFENGILHVKQPKLITSSENKGQELPTSDAQRQQKLADEPQPTPQKKNEEQTKDEKTPSPTEELPKHQATNADKPEMEEPNTKEAKDLVEKTPAENTGATSTVEDENRPSYACRLDKDAFIGTAAVLAEKLKMPRKLMNMTLIALLVLGIGLYISNKMKSNN

SEQ ID NO: 11377 - protein, 314 aa, Listeria ivanovii
MRKNDWLKNVLITILVTVFVVCVNMSLETKAQAANIPHPLPINRIFPDPDLAERVKETLKKSNVTDVVSQRELDEVQIFNGNGRTIISIDGLQYFTNLKELYLSRNHIRDLTPLKDLTNLAILCLDKNRLENLNGIPSNKLVRLSLEDNELTQVDALANLTQLETLFISKNQLKNIDALANLTNLKTLDLNRNELEDLSPLARLENLTSLDLANQKCVKEALVYKPKLVIPNTIKGPDKVLITPSYISDNGSYTNGQLKWNLPVCKEKVCYTFAQLVRVGKTEVVFNGVVIQPLYPKKLETKKRASFYLCGLTK

SEQ ID NO: 11378 - protein, 247 aa, Prochlorococcus marinus subsp. pastoris str. CCMP1378
MNLLSNDFLFGFLINFILISLFFRVPLMTKAGWISAGVLGSILWGCLSWQGWISVVIYLFLGSLVTKIGYKFKNEKGIAEKRGGKRGPENVWGSAATGLFFAIMVKLNFTNLVFYKIGFAASFAAKLADTFGSEIGKRFGRNTYLITSFRKVERGTEGGISLEGTAASSLGAIFMSLIMFILNIISTKYQFLIVAISGFLATISESFIGAKFQDKYKLSNELVNSIQTSISSVIAIFVLIFYLKVST

SEQ ID NO: 11379 - protein, 296 aa, Zea mays
MALARAKRLPPLHLSLNVPTRPAVQEPPSRQQANPPLAGPQSASTPLARSSQFRLADFDRLAVLGRGNGGTVYKVRHRETCALYALKVLHQGDAAATEADILGRTASPFVVRCHSVLPAGSGDVALLLELADGGSLDAVRSRRGAFAEAALAEVAAQALSGLAYLHARRIVHLDVKPANLLATAAGEVKVADFGIARVLSRAGDLCTSYVGTAAYMSPERFDPDAHGGHYDPCAADVWSLGVTVLELLMGRYPLLPAGQQPNWAALMCAICFGEPPALPDGAASPELRSFIAACLQ

SEQ ID NO: 11380 - protein, 505 aa, Schizosaccharomyces pombe
MDASVSLLPEGESLHRSLSASQIQMLAFGGIIGTGLFLGIGSSLAESGPASLLISFSVLGVSVYCTMLALGEMSVYMPVAGSFCTYVGRYVDEALSFSLTWNYWLNDTIALASHVLATRLVVDFWLIPTEGDPVSASLSLPPWKEAVRIITPITSLSANIILNMLPVGGFGEIEYWLSSIKVFTVAAFIVNGILCNLGVNNEKKFIGFRYWKDPGAFNNGIIGVISSFVNAAFAYAGTESIALTAGEAKSPITTLPKAIRFTAHRVLLLYIISVLVVGINLPYNTPGLDGDSVRMSPFTFVFKKFGVPGAASIMNLVILSSALSAGNHSLYAGTRLLYSLAKSGHAPKVFSKCNKHGIPWLSVLATSATAILCLMSSQAGKTWGFLLNVIAVSNQISWIFIAVSSLRFRKALRVQGKTHRLYFPNWTYPVGPYIIILLNGVFLFLQGYKSLYPFRLSLFVSYYMEIPIVLGLYLIWKIYKKTKLVSSSEADLETDWKSLEDTDSA

SEQ ID NO: 11381 - protein, 376 aa, Mycobacterium tuberculosis H37Rv
MHTAICDELGIEFPIFAFTHCRDVVVAVSKAGGFGVLGAVGFTPEQLEIELNWIDEHIGDHPYGVDIVIPNKYEGMDSQLSADELAKTLRSMVPQEHLDFARKILADHGVPVEDADEDSLQLLGWTEATATPQVDAALKHPKMTMVANALGTPPADMIKHIHDSGRKVAALCGSPSQARKHADAGVDIIIAQGGEAGGHCGEVGSIVLWPQVVKEVAPVPVLAAGGIGSGQQIAAALALGTQGAWTGSQWLMVEEAANTAVQQAAYVKATSRDTVRSRSFTGKPARMLRNDWTEAWEQPESPKPLGMPLQYMVSGMAVKATHKYPNETVDVAFNPVGQVVGQFTKVEKTATVIERWVQEYLEATARLDALNAAASV

SEQ ID NO: 11382 - protein, 149 aa, Oryza sativa (japonica cultivar-group)
MSLVRRSNVFDPFADFWDPFDGVFRSLVPATSDRDTAAFANARVDWKETPESHVFKADLPGVKKEEVKVEVEEGNVLVISGQRSKEKEDKNDKWHRVERSSGQFMRRFRLPENAKVDQVKASMENGVLTVTVPKAEVKKPEVKAIEISG

SEQ ID NO: 11383 - protein, 315 aa, Staphylococcus aureus subsp. aureus Mu50
MSWPLKHGKGAYMSKVQNESNNVVKRGLKDRHISMIAIGGCIGTGLFVTSGGAIHDAGALGALIGYAIIGIMVFFLMTSLGEMATYLPVSGSFSTYATRFVDPSLGFALGWNYWFNWVVTVAADITIAAQVIQYWTPLQGIPAWAWSALFLVIIFSLNSLSVRVYGESEYWLALIKVITVIVFIAIGLLTIVGIMGGHVVGFEIFNKGEGPILGGNLGGSLLSILGVFLIAGFSFQGTELIGITAGESENPERAVPKAIKQVFWRILLFYILAIFVIGMLIPYDSSALMGGSDNVATSPFTLVFKNAGFRLQHHL

SEQ ID NO: 11384 - protein, 287 aa, Saccharomyces cerevisiae
MTYTTRQIGAKNTLEYKVYIEKDGKPVSAFHDIPLYADKENNIFNMVVEIPRWTNAKLEITKEETLNPIIQDTKKGKLKFVRNCFPHHGYIHNYGAFPQTWEDPNVSHPETKAVGDNDPIDVLEIGETIAYTGQVKQVKALGIMALLDEGETDWKVIAIDINDPLAPKLNDIEDVEKYFPGLLRATNEWFRIYKIPDGKPENQFAFSGEAKNKKYALDIIKETHDSWKQLIAGKSSDSKGIDLTNVTLPDTPTYSKAASDAIPPASLKADAPIDKSIDKWFFISGSV

SEQ ID NO: 11385 - protein, 335 aa, Pseudomonas syringae pv. tomato str. DC3000
MKYKTFGKTGLSVSQIALGTGNFGTGWGYGADPVVSEAMFNTYAEAGGNFIDTADIYQFGQSEELLGTLLQGRRDDFVLATKFTNGASANPGRLTTGNSRKAMVSSVEASLKRLKTDRIDLYWAHHPDAVKPIEEILRGLEDLARAGKILYAGLSNFPAWRLARAVTLADISRTLPIAAAQFEHSLVHRQPETDLFQASHALGLGVVTWSPLGGGMLTGKYRQGEKGRAEGFGGKVFQPENSAQRTLILDSVLDIAAELGVSASQVAIAWAGTHGAIPIIGPRSQEQIGDNLGALALTLADEQIQRLDAVSSLDPTAAPRSAVDWSDGTRTRVVA

SEQ ID NO: 11386 - protein, 223 aa, Arabidopsis lyrata
MRIRRREEKENQEYKKGLWTVEEDNILMDYVLNHGTGQWNRIVRKTGLKRCGKSCRLRWMNYLSPNVNKGNFTEQEEDLIIRLHKLLGNRWSLIAKRVPGRTDNQVKNYWNTHLSKKLVGDYSSAVKTTGEDDDSLPSLFITAATTSCHHQQENVYENIAKRFDGVVSASYEDKPKQELAQNDVLMATTNDPSHYYGNNALWVHDDDFELSSLFTRNDEFCFW

SEQ ID NO: 11387 - protein, 369 aa, Perilla frutescens
MAEAVTPGICTTGWRRGGVHAPTYNISIKPATALLVGCTTKTKSITSFSTDSLRTRGRARRPTMSLNAAAAEMETEMETLRKGIAEFYDESSGVWENIWGDHMHHGFYEPAADVSISDHRAAQIRMIEESLRFASFSPITTTEKPKNIVDVGCGIGGSSRYLARKYGAKLSRAITLSSPVQAQRAQQLADAQGLNGKVSFEVADALNQPFPEGKFDLVWSMESGEHMPDKKKFVNELVRVAAPGGRIIIVTWCHRDLSPSEESLRQEEKDLLNKICSAYYLPAWCSTADYVKLLDSLSMEDIKSADWSDHVAPFWPAVIKSALTWKGITSLLRSGWKTIRGAMVMPLMIEGYKKGVIKFAIITCRKPAS

SEQ ID NO: 11388 - protein, 198 aa, Triticum aestivum
MARISNWSLVFLLISTLLHIEPSLSSPSPSPSPSPFIKSSCSSTQYPALCVSSLSVYASSIQQDPHQLVQTALSLSLNRTQATKTFVANCNKFRGLKPREHAALKDCAEEISDSVDRLSRSLKELKLCKVKGEDFTWHISNVETWVSSALTDESTCGDGFSGKALNGKIKDSIRARMLNVAQVTSNALSLINHYAAQH

SEQ ID NO: 11389 - protein, 495 aa, Neurospora crassa
MLTPTTLLLLSPLLYLLTLLFRTALYRLRARSLGCSPVAVYPHKDPILGLDLFRESLRAMNTHALLPLWDARFKRYGNTHYTLTLGKWVLMTNEPENVKVILGTKMAEWPIDGPRLHASVAVLGKKSIFTTNGAQWREARGMIRPSFVRDQVADLHCFAKHVGNFLNAIPKDGSTFDMQELLLSMTMDSSTDFLLGCSTNSLLQPSPEAKQFLEDFEYTSREAAKKSRLGTLLNWLPNGEFQATVTRVREYVRAYIRKSQAEKTDKKERDYVFLHEILKSGADEEHAIDQVLSVIIAGRDTTAAAMTACFYYLARNPEAVKKLRKEIFDMEDEMPTWEQLKNMKYLNMIIKEGLRLFPPASTNSRAPIKDTVLPRGGGPDGKQPILVPKGQVVRWSLYSLHRRKDIWGEDAHEFRPERWDENLRVGWEYIPFSGGPRICLGQQFALTQIEYALFKFFRAFKSIEPRDDNGPLLLRTNLTVTFAKGCLVSATPDSN

SEQ ID NO: 11390 - protein, 178 aa, Brassica rapa
MENMGTRVIEPLIVGRVVGDVLDNFTPTIKMNVSYNKKQVSNGHEFLPLAVSSKPRVEIHDGDLRSFFTLVMTDPDVPNPSDPFLKERLHWLVMNIPGTTDATFGKEVVSYELPKPNIGIHRYVFVLFRQKQRRVKFPSNIISRDQFNTREFAIENDLGLPVAAVFFNAQRETASRRR

SEQ ID NO: 11391 - protein, 261 aa, Thermobifida fusca
MTSTPRTAIVTGATSGIGLAVARELANRGHRVFICARNGERVAETAKQLSDNGNLPVDGQACDVRSLDDIRAMVRAAVERFGTIGILVNNAGRGGGGVTADIPDDLWDDVLATNLTSVFRVTREVLTTGGMREASWGRIINIASTAGKQGVVLGAPYSASKHGVVGFTKALGNELAPTGITVNAVCPGYVETPMAEAVRQRYAQAWQISEDEVLAKFQAKIPLGRYSTPEEVAGLVGYLTTETAASITSQALNVCGGLGNF

SEQ ID NO: 11392 - protein, 471 aa, Zea mays
MAALATLLRHSRRSHAHVLPISRALSTTTPTTGGTDPVAITLSDAKRQLLRERDPDRVVSILDAIDTASISAASTRHALSLAARRLSRSRRFADAEALLSSHLTASTTEAHLAAVLCSYASANLPEKAIDAFRSAAPSLPTPNSPLPFNALLSTFIRCRRYRRVPVLFAELSKEFSITPNATSYGILVKAYCMARDDAKAKQALDLMREQGISPTNRIYTTLIDSMYKRKMTNEAESLWKEMVESECEPDVATYNVKAMYYALHGKPEEVMEVMTEMEAAGVKPDTTTYNFLMTSYCKSGKLEDAKVLYHSLAEKGCSADAATYKHMLAELCAYGDFDAGLGIFKDSLKRRKVPDFRTMKGLVEGLAKGGRVADAKEVVAEVKKMFPENLLSGWKKVEKELGLDSDSGETPLLEVTSGETVAEVRPDAAEVEALELEGSAAEEVTVSEESSDDEAYVPEASSSEEVPQGRA

SEQ ID NO: 11393 - protein, 247 aa, Methanocaldococcus jannaschii
MFRGVMESAKEFKKVVDTISTLLDEICFEVDEEGIKASAMDPSHVALVSLEIPRLAFEEYEADSHDIGIDLEAFKKVMNRAKAKDRLILELDEEKNKLNVIFENTGKRKFSLALLDISASSVKVPEIEYPNVIMIKGDAFKEALKDADLFSDYVILKADEDKFVIHAKGDLNENEAIFEKDSSAIISLEVKEEAKSAFNLDYLMDMVKGVSSGDIIKIYLGNDMPLKLEYSIAGVNLTFLLAPRIEG

SEQ ID NO: 11394 - protein, 339 aa, Francisella tularensis subsp. tularensis
MNKKILVTGGVGYIGSHTVVELLDRDYQVVVVDNLSNSKVSVIDRVKKITNKDFDFYQLDLLGKAKLTKVFQEYDIYAVIHFAGFKAVGESVEKPLEYYHNNIQGTLNLLELMQEYKVYNFVFSSSATVYGMNNKPPFTEDMPLSTTNPYGATKLMLEDILRDLQNANNNFNITCLRYFNPVGAHSSGMIGEDPQGIPNNLMPYVAQVGAGKLAKLSIFGGDYETIDGTGVRDYIHVVDLAIGHILALEKLSQDKPSWRAYNLGSGNGYSVLEIVKAYQKALGKEIPYQIVARRAGDIAASFADVAKAKRELGFETQKTIDDICDDMLKWQKYAKENNI

SEQ ID NO: 11395 - protein, 548 aa, Listeria monocytogenes EGD-e
MKKRWNSVFKLVLMVTAILGLSLYVTTSQGVEVRAESITQPTAINVIFPDPALANAIKIAAGKSNVTDTVTQADLDGITTLSAFGTGVTTIEGVQYLNNLIGLELKDNQITDLTPLKNLTKITELELSGNPLKNVSAIAGLQSIKTLDLTSTQITDVTPLAGLSNLQVLYLDLNQITNISPLAGLTNLQYLSIGNAQVSDLTPLANLSKLTTLKADDNKISDISPLASLPNLIEVHLKNNQISDVSPLANTSNLFIVTLTNQTITNQPVFYQNNLVVPNVVKGPSGAPIAPATISDNGTYASPNLTWNLTSFINNVSYTFNQSVTFKNTTVPFSGTVTQPLTEAYTAVFDVDGKQTSVTVGANELIKEPTAPTKEGYTFTGWYDAKTGGTKWDFATDKMPAEDITLYAQFTINSYTATFDIDGKLTTQKVTYQSLLEEPVAPTKDGYTFTGWYDAKTGGTKWDFATGKMPAGNITLYAQFTKNDNPNPDDPTTNTPTGNGDGTSNPSNSGGNTTLPTAGDENTMLPIFIGVFLLGTATLILRKTIKVK

SEQ ID NO: 11396 - protein, 402 aa, Pyrococcus furiosus DSM 3638
MKAFISENVRGIYAFDENGNLIEKRYFTDKPEKVLDQLLKGEITKDLEELLNSLKEKGYDEFVFEHPELSRRAKELGFSATTEFPNIAGERLRSNPEEFLGENWFEEYYKVGVALTRMRIQEQSGARDKMVIQAIEALDDVDKVINLLVARLREWYSLHFPELDELLPKHPQYVAFVKTVGHRDNINEEVLRELGLSEEKIKKILEAKEKTMGAWMDQTDIEVVRQLAEEIDRLYQLRKKLEDYIDRAMDDVAPNLKALVGAKLAARLISLAGGLRELAMMPSSTIQVLGAEKALFRHLRTGAKPPKHGVIYQYPAINRSPWWQRGKIARALAGKLAIAARVDYFSGEYIAEELKKELEARIREIKEKYPKPPKRKREERKGKKPWKKDKKKKKKKEKPRRR

SEQ ID NO: 11397 - protein, 408 aa, Oryza sativa; identical to SEQ ID NO: 9597

SEQ ID NO: 11398 - protein, 242 aa, Triticum aestivum
MDCGTDERQYGHGGDGDAAEWKKVAELREFVEAQDPSAKEEDDFALRRFLRARDHNINKASVMLLRYLAWKRVTKPHGFISDDEVRGEIAKGRDRHQGFDRLGRPMSYLYGGRHFPVRRDHEDLKRYVVYVFNKICTKLPAGQEKFAAVIDLKGWGYANCDIRGYLAGLDIMQSYYPDRLGRVFLIHVPYLFMAAWKIVFPLIDDKTKKKFVFVADRDLDATLRDAIDESQLPEEYGGKLKL

SEQ ID NO: 11399 - protein, 512 aa, Candida tropicalis
MLDQIFHYWYIVLPLLVIIKQIVAHARTNYLMKKLGAKPFTHVQLDGWFGFKFGREFLKAKSAGRQVDLIISRFHDNEDTFSSYAFGNHVVFTRDPENIKALLATQFGDFSLGSRVKFFKPLLGYGIFTLDGEGWKHSRAMLRPQFAREQVAHVTSLEPHFQLLKKHILKHKGEYFDIQELFFRFTVDSATEFLFGESVHSLRDEEIGYDTKDMAEERRKFADAFNKSQVYLSTRVALQTLYWLVNNKEFKECNDIVHKFTNYYVQKALDATPEELEKQGGYVFLYELAKQTKDPNVLRDQSLNILLAGRDTTAGLLSFAVFELARNPHIWAKLREEIESHFGSGEDSRVEEITFESLKRCEYLKAVLNETLRLHPSVPRNARFAIKDTTLPRGGGPNGKDPILIRKNEVVQYSISATQTNPAYYGADAADFRPERWFEPSTRNLGWAYLPFNGGPRICLGQQFALTEAGYVLVRLVQEFPSLSQDPETEYPPPRLAHLTMCLFDGAYVKMQ

SEQ ID NO: 11400 - protein, 371 aa, Novosphingobium aromaticivorans
MTTCCAAVARGANQPFTIEQLTVDGPRAGEVLVQIAGVGLCHTDLVFRDQFDAFAKPGVLGHEGAGVIEAVGEGVTGLAAGDRVVLGFSSCGECARCAEDLPSYCVQFVPLNYAGMRLDDGSTAHAAHDGERVSSHFFGQSSFATLAVTRARNVVKVPDSTTVPLELLGPLGCGLMTGAGAVMNSMACKAGSSLIVFGGGPVGLAAVMAGKVRECSQIILVEPVASRRAIAQELGATHVIDPADGDLGEAIRAILPLGVDAALDTTGNVAVIETGLGNLAPHGIIGLVGVPRDMTASVTFNIAALMTPGLRIIGIIEGDAVPQDFIPELLALNAQGRFPFERMVQTFPLSRINEAIDAQARGDCIKVVLIP

SEQ ID NO: 11401 - protein, 1145 aa, Glycine max
  unsure (1)..(1145): unsure at all Xaa locations
FIFQWLQQAERRIPPFRRRKSTPHEQXLSHHSSNNNNNIDSMSKAIAQYTEDARLHAVFEQSGESGRSFNYSESIRIASESVPEQQITAYLVKIQRGGFIQPFGSMIAVDEPSFRILGYSDNARDMLGITPQSVPSLDDKNDAAFALGTDVRALFTHSSALLLEKAFSAREISLMNPIWIHSRTSGKPFYGILHRIDVGIVIDLEPARTEDPALSIAGAVQSQKLAVRAISQLQSLPGGDVKLLCDTVVESVRELTGYDRVMVYKFHEDEHGEVVSESKRPDLEPYIGLHYPATDIPQASRFLFKQNRVRMIVDCHASAVRVVQDEALVQPLCLVGSTLXGAPHGCHAQYMANMGSIASLVMAVIINGNDEEGVGGRSSMRLWGLVVCHHTSARCIPFPLRYACEFLMQAFGLQLNMELQLAAQSLEKRVLRTQTLLCDMLLRDSPTGIVTQSPSIMDLVKCDGAALYFQGNYYPLGVTPTEAQIRDIIEWLLAFHGDSTGLSTDSLGDAGYPGXLPRLGMQFVGWXVAYITEKDFLFWFRSHTAKEIKWGGAKXILRTRMMGXRMHPRSSFKAFLEVVKSRSLPWENAEMDAIHSLQLILRDSFKDAEHRNSKAVVDPHVSEQELQGVDELSSVAREMVRLIETATAPIFAVDVDGHVNGWNAKVSELTGLPVEEAMGKSLVHDLVFKESEETMNKLLSREEDKNVETKMRTFGKEHQNKAAFLVVNACSSKHFTNNVVGVCFVGQNVTGQKIVMHKFINIQGDYKAIVHSPNPLIPPIFASDDNTCCLEWNTAMEKLDPSNENVTVGGVDVIGKMLVGEVFGSCCQLKGSDSITKFMIVLHNALGGQDTDKFPFSFLDRHGKYVQTFLTANKRVNMEGQIIGAFCFLQIMSPELQQALKAQRQQEKEFLGRMKELAYICQGVKKPLSGIRFTNSLLEATSLTNEQKQFLETSVACEKQMLKIIRDVDLESIEDGSLELEKGEFLLGNVINAVVSQVILLLRERNLQLIRDIPEEIKTLAVYGDQLRIQQVLSDFLLNIVRYAPSPDGWVEIHVRPRIKQISDGLTLLHAEFRMVCPGEGLPPELIQDMFNNSRWGTQEGLGLSMSRKILKLMNGEVQYIREAERCYFYVLLELPVTRRSSKKC

SEQ ID NO: 11402 - protein, 172 aa, Thermoplasma acidophilum
MKPYLIMKIGKNVYIAETAVIIGDVEIGDNVSIFDGAVIRADMDSIKIGDNTNVQDNVTIHTDTGFPTKIGSNVSIGHNAVVHGCTVDDYVLIGMGAILMNGSHIRTGSIVGAGALVTQNFESEEYSLILGVPAKVTRINKEQMAYVKANAEDYLKLKDLHMSGRLERYRPK

SEQ ID NO: 11403 - protein, 197 aa, Oryza ridleyi
GQTPVFPRILGHEAGGIVESVGEGVTELVPGDHVLPVFTGECKDCAHCKSEESNMCDLLRINVDRGVMIGDGQSRFTIKGKPIFHFVGTSTFSEYTVIHVGCLAKINPEAPLDKVCILSCGISTGLGATLNVAKPKKGQTVAIFGLGAVGLAAMEGARLSGASRIIGVDLNPAKFEQAKKFGCTDFVNPKDHSKPVQ

SEQ ID NO: 11404 - protein, 920 aa, Neurospora crassa
MTSLSSIAVGGGPFERDTDPNPSPSSSIDSNTTPDTDFTPMGSPFQEVAVPKNKRTKSIPEKGIPAVKTSDGPNGARGGIFVGGTKAALFPCGISLAATWNKALLREVGRHLAEEAKARQANILLAPTVCMHRHPLGGRNFESFSEDPLLTGKLAAQYIKGLQERGVAATIKHFVGNEQETHRLTVNSVIAERPLREIYLRPFEIAVREAKPWAVMSSYNLVNGVHADMNTHTLKEVLRDEWKFDGAVMSDWGGVNSTAESIKAGCDIEFPHSKKWRYEKVMEALNKGELSQADIDRAAENVLTLVERTKGSDLTPEAAEREDDREETRELIREAGIQGLTLLKNEGSILPINPKTTKVAVIGPNANRAIAGGGGSASLNPYYTTLPLDSIRKVAEKPVTYAQGCHIYKWLPVASPYCSDKTGKPGVTIEWFKGDKFKGEPVVIQRRTNTDLFLWDSAPLAQTGPEWSAIATTYLTPKHSGKHTISYMSVGPGKLYINGKLSLDLWDWTEEGEAMFDGSVDYLVELEMVANRPVELRVEMTNELRPLSKQKQMGMTHRYGGCRIGYKEADQIDYLQQAIAAASSADVAIVIVGLDAEWESEGYDRQTMDLPYNGSQDRLIEAVVAANPNTVVVNQSGSPVTMPWADRVPAILQAWYQGQEAGNALADVLFGLRNPSGKLPCTFPKRLEDTPAYHNWPGENLEVIYGEGIYIGYRHYDRTKIAPLFPFGHGLSYTKFEYGRPSLSSRVLRENGVIELCVAISNVGEYDGAETVQVYVRDEKSKLPRPEKELVAFEKVALERGETKHLRMELDKYAVGYYDTDKKGWVAEEGRFVVLVGSSAGDIKTIALSKRYLHSHSFRLLRPSRGAEIDLPMAERRIYPIPLADTDQSLYIKENGLGDFDEMIMKDIKMADFYVQVVNG

SEQ ID NO: 11405 - protein, 387 aa, Oryza sativa (japonica cultivar-group)
MGTRELLVVLAVVVMAAVGAGAQSSSASPAPATSQAPTVRQQTPFGRTMSTVITVSISVFFFLLFFCAYINQCRLAEAGDARAAAAAAAGGGAGGGPSRRGKRGLDPAVVATFPIVPYREVVKHKIGKSVLECAVCLTSFDDGDDLRLLPHCSHAFHPECIDPWLESRVTCPLCRANLEKPPPPPPPLPAAAAASPSPERSPRCQPSPPPPPPPHALVIPVEDEEDDSDEDDRKEEAVELEMLRSERRAARLPRSHSTGHSLVASAAAAAESGDHERFTLRLPQHVRDEVLRSLRLRHAASLVNLSDMSSEGSSRGGRRALGLAFGNGGGSSHGGRRWQAFLARTVSWARGGGDGSVRRGWDGSTRRGKDDAESSRKGATSPAAGRP

SEQ ID NO: 11406 - protein, 367 aa, Nostoc punctiforme
MPLEWYSRCFFVKEKIFMRYKLLGKSGLRVSELSLGTMTFGEDWGWGASVDESRKIFDTYTEAGGNFIDTANGYTDGSSEKIVGELIAKERERFVVATKYSFPLQMNNKKGDPNASGNHRKNLIQSLEGSLKRLNTDYIDLFWLHAWDFTTPIEEVLRSLDDVVRQGKVLYIGISDAPAWIVSQANTIAQFQGWTQFVALQIEYSLIQRTPERDLLPMAKAFDLAVTPWSPLGGGVLTGKYNQPPQAGDEQGRLTNAALGSISERNLAIAQVVSEVAAEIGHTPSQVALAWLLAQSGVIIPIIGARKLTQFQDNLASIEVSLSPEHLQRLDEISKIELGFPHDFLQNDVIRDRLFGGTFNTIENHHI

SEQ ID NO: 11407 - protein, 303 aa, Lycopersicon pimpinellifolium
MRSKDSKETTYISDTTSYRFPVESSQIPFAALQEATNNFNCNSLIGLGGFGTVYRGVLCDGTKVALKRCKLESSQGIEEFQTEIEMLSHFRHPYLVSLIGYCDENNVTILIFKYMENGSLSSHLYGSYLPTMTWEQRLEICIGAARGLYYLHKNAVIHRDVKSANILLDENFVAKTTDFGVSKTRTELDQTHVSTVVKGTLGYLDPEYVIRGKLTEKSDVYSFGVVLFKVLCARSAIVHYISKGLVTLAAWAMDSHKKGQLEQIVDPNLASKIRPKYLNKFGETAVKCLADSGVDRPSVGDVL

SEQ ID NO: 11408 - protein, 364 aa, Escherichia coli CFT073
MMSKNYHIAVLPGDGIGPEVMTQALKVLDAVRNRFAMRITTSHYDVGGAAIDNHGQPLPPATVEGCEQADAVLFGSVGGPKWEHLPPDQQPERGALLPLRKHFKLFSNLRPAKLYQGLEAFCPLRADIAANGFDILCVRELTGGIYFGQPKGREGSGQYEKAFDTEVYHRFEIERIARIAFESARKRRHKVTSIDKANVLQSSILWREIVNEIATEYPDVELTHMYIDNATMQLIKDPSQFDVLLCSNLFGDILSDECAMITGSMGMLPSASLNEQGFGLYEPAGGSAPDIAGKNIANPIAQILSLALLLRYSLDADDAASAIERAINRALEEGIRTGDLARGAAAVSTDEMGDIIARYVAEGV

SEQ ID NO: 11409 - protein, 163 aa, Glycine max
MATSGSETKQVMVIGIDDSDFSTYALQWTLDHLLSPANVPKFKIFLVYAKPSVASAVGFVGPGAAEVLPVVEADLRKTAAKITERATELCKKKSVNDVAVEVLEGDPRNVLCEAVEKHQASMLVVGSHGYGTLKRAVLGSVSDYCAHHAHCTVMIVKKPKHKH

SEQ ID NO: 11410 - protein, 503 aa, Glycine max
  unsure (1)..(503): unsure at all Xaa locations
RHLATHTHPPLSAMDERHIQKSYWLQHSADLSVEAMMLDSKAAHLDKEERPEVLSLLPPFEGKSVIELGAGIGRFTGELALKAGQLLAVDFIDTAIKKNETINGHHNHVKFLCADVTSPNMSNNVSEGSVDVVFSNWLLMYLSDIEVEKLAERMVRWLKDGGYIFFRESXCHQSGDSKRKYNPTHYREPRFYTKVFKECHMSDNTGKFLWSFLLWGCKCIGAXMVRNKKNQNQICWSSRKVRSQDDRGFQRFLDRVEYSHKSILRYERMYGPGFVSTGGLETTKEFVAKLGLKPGQKVLDVGCGVGGGDFYMAENFDVEVIGIDLSINMISLAIERAIGLNYAVEFDCADCYRKTYPENTFDVIYTRDTMLHVKDKPTLFRSFYKWLKPGGKILITDYCKSAGSPSLEFAEYIKKGGYYLHDIKAYRQMLEDAGFDDVIAEDRTDQFVNTLQQELNALENKKDDFIGDFSEEDYNEIVERWKAKQTWGASREQMWGLFIAKKN

SEQ ID NO: 11411 - protein, 384 aa, Geobacter metallireducens
MKKLTILGSTGSIGTSTLEIVAAHPDRFQVIALTAGSNLELLKQQVEVFRPRLVSVLTADLARQLDRMLSDPKPEIHHGIPGLIAAATAGEADVVVAAIVGAAGLVPTAAAIKAGKDVALANKETLVTAGRIMMDLVRENGVRLYPVDSEHSAVFQSLEGQSGKDVKRIILTASGGPFLNLPLDRLSRVSVADALNHPNWSMGQKITIDSATMMNKGLEVIEARWLFDTPAERIAVNIHPQSIIHSMVEYVDGCVMAQLGVPDMKAPIAYALTYPERIPTGVKPLDLTALSGLTFLAPDYQRFPALKLAYDALAAGESMPAVMNAANEVAVEAFLKGKIGFTGIATSIARTMDAHEPHTLATIEDVLSSDLWAREKSRELIGLS

SEQ ID NO: 11412 - protein, 287 aa, Zygosaccharomyces bailii
MTYTTRQIGAKNTLDYKLFIEKDGKPVSPFHDIPLYADEDKQIFNMVVEIPRWTNAKLEITKEENLNPIIQDTKKGKLRYVRNCFPHHGYIHNYGAFPQTWEDPNVVHPETKAVGDNDPVDVLEIGETIGYTGQVKQVKVLGIMALLDEGETDWKVIAIDVNDPLAPKLHDIEDVEKYFPGQLRATNEWFRIYKIPDGKPENQFAFSGEAKNKKYALDIIRETHESWKQLIHGQVSDSKGISLTNTTLTDTPTYSAAAASEVPSASPQPDAPVDKSVDKWFFISGSA

SEQ ID NO: 11413 - protein, 167 aa, Oryza sativa
SRPAPPAPFLLPKERSEREREKASQATMASGGVVKKEIGGNHDVLRFGVNGVKGDLAPPHPLQASVHKDAKFWADKKRFGAEAIYGSAFNIRKDLDAQILSKFQRPPGALPSSMLGYEALTGSLDDFGFEDYLNLPQDSESFRAPDMHHGMEVRLGLSKGPVCPSFN

SEQ ID NO: 11414 - protein, 218 aa, Acholeplasma laidlawii
MLSIGIVGLPNVGKSTLFNAITKSQVTAANYPFATIDPNVGVVHVKDERLEKLAAIYKSGKIIPTTIEFIDIAGLVKGASSGEGLGNQFLSHIRQVDAIAHVIRCFEDSEITHVEGKVDPLRDLEIIEIELRLSDLESVDKRLARLEKQVKVKIKEAIIEQSALLKVKHMIENELPTSVLEFTDEEEKIVKGFNLLSLKPALYIANMAETDLVDPESN

SEQ ID NO: 11415 - protein, 271 aa, Glycine max; identical to SEQ ID NO: 8244

SEQ ID NO: 11416 - protein, 437 aa, Oryza sativa
  unsure (1)..(437): unsure at all Xaa locations
MAGWYEEAVGLLRRPAVAEMAVDVLLCAVPIWAAVMIGLVIGWAWRPRWTGLLYLGFRSRLRLLYVPPGLGARRLWLACTALSAFSVAPRLLSTAFGSRGKHQRKDAALADDDDAADASGDAGDCVDGRTFFEDVVTEKELEHLXLQLLDNKASGDTTWGHLMERTTXAGMTYKAWRPXSPEVGPIMYCSRTIFEDATPELVRDFFWDDEFRLKWDPMLAYFKILEEFPQNGTMIIHWIKKFPFFCSDREYIFGRRIWESGKTYYCVTKGVPYPALPKKEKPRRVELYFSSWRIRAVQSPKQDGQQSACEVTLVHYEDMGIPKDVAKVGVRHGMWGAVKKFQSGFRAYQQMRDTENTLSRSAIMARVTTKTSIASSSCPLDQEPSNAAKTIDESENSRVDWKWVVFGGAVAAVCVLNTGLVGKALLIGAASRRQAKK

SEQ ID NO: 11417 - protein, 230 aa, Nostoc sp. PCC 7120
MIRLLVGILVFVINTVYRDRPYPRFYVLETVARVPYFSYLSVLHLYETLGWWRKADWLKVHFAESWNELHHLLIMESLGGAGFWGDRFLAKTAALIYYWIIIAVYFVSPHSAYNFMEQVEQHAYSSYDKFLTTHEAELKTQPAPEVAKTYYRDGDLYMFDEFQTAHSPSERRPNIDNLYDVFVAIRDDEMEHVKTMVACQQTNAKYSLKSPHNPEAKTVVLTNAQMNTQV

SEQ ID NO: 11418 - protein, 244 aa, Salmonella enterica subsp. enterica serovar Typhi
MSFEGKIALVTGASRGIGRAIAETLVARGAKVIGTATSENGAKNISDYLGANGKGLMLNVTDPASIESVLENIRAEFGEVDILVNNAGITRDNLLMRMKDDEWNDIIETNLSSVFRLSKAVMRAMMKKRCGRIITIGSVVGTMGNAGQANYAAAKAGLIGFSKSLAREVASRGITVNVVAPGFIETDMTRALSDDQRAGILAQVPAGRLGGAQEIASAVAFLASDEASYITGETLHVNGGMYMV

SEQ ID NO: 11419 - protein, 354 aa, Lycopersicon esculentum
MSCFSCCDDDDMHRATDNGPFMAHNSAGNNGGQRATESAQRETQTVNIQPIAVPSIAVDELKDITDNFGSKALIGEGSYGRVYHGVLKSGRAAAIKKLDSSKQPDREFLAQVSMVSRLKDENVVELLGYCVDGGFRVLAYEYAPNGSLHDILHGRKGVKGAQPGPVLSWAQRVKIAVGAAKGLEYLHEKAQPHIIHRDIKSSNILLFDDDVAKIADFDLSNQAPDMAARLHSTRVLGTFGYHAPEYAMTGQLSSKSDVYSFGVVLLELLTGRKPVDHTLPRGQQSLVTWATPRLSEDKVKQCVDARLNTDYPPKAIAKMAAVAALCVQYEADFRPNMSIVVKALQPLLPRPVPS

SEQ ID NO: 11420 - protein, 343 aa, Zea mays
GQWPANGMASAPSPFFPPNFLLQMQQTPSDHEHQEQHHHHHHHKHHLAAPPLHPHHNPFLPSSQCPSLQDFRGMAPIMLGKRPMYGADVQVVGGEEVNGCGGVNEDELSDDGSQAGGEKKRRLNVEQVRTLEKNFELGNKLEPERKLQLARALGLQPRQVAIWFQNRRARWKTKQLEKDYDALKRQLDAVKADNDALLSHNKKLQAEILSLKGREAGGSSELINLNKETEASCSNRSENSSEINLDISRAPASEAPLDPTPPPGAGGGGMIPFYPPSVGGRPASAAGVDIDQLLHTSAPKLEQHGSGGAVVVQAAETASFGNLLCGVDEPPPFWPWADHQHFH

SEQ ID NO: 11421 - protein, 250 aa, Zea mays; identical to SEQ ID NO: 7453

SEQ ID NO: 11422 - protein, 162 aa, Glycine max
  unsure (1)..(162): unsure at all Xaa locations
LVCFLDIYHQNFYVCNPLIQSLKELPARSVRVWARDAVGMTVNGNSTGAGYKILLVGCDGEYEIYDSLTKSWSHPXXXPSDIKLPLSLNFMSHAVSINSTLYFMHSDPKGIVSYDMATGVWTQYIIPAPLHLTDHMLEECDGRLLLVGLLTKNAAXTCICIW

SEQ ID NO: 11423 - protein, 469 aa, Oryza sativa
  unsure (1)..(469): unsure at all Xaa locations
XWASSSRSRHRRRCRRHRGSGRRRGGPPSSTSRSGPSASRSCRSRRRRHRPRSRGGPRGGTPPASTPATRGRHPAAAARRSSASSWASPTDRXKGEKTRKATDGSEEPSDSGPTTPLPDKKLLVFVLDRLQKKDTYGVFSDPVDPEELPDYHDIIKHPMDFSTIRKKLNKGAYGNLEQFEDDVFLLTSNAMCYNSPDTIYYRQARAIQELAKKDFENLRQDSDASEPEPEPEIKPDPEPTRRGRPPNKNTIKQKVGKPPVERATADFSGATLASVGNSGHRTQPPFDLQRQVMNGSFIAGASFASRNNGYNWSNERKLERIEDYSGSMGKWSAKSGRKPILTEESSRSTYGQPQPSSSIYELPVSSSYNETRKLLVPVGVQLQQSYPRSLARFAAQLGPVAWEIASKRIERALPPGTKFGRGWVGDGEAXERNSATSAYYIFNSLEHPSSTETSSEQPTHXXVRPAQAI

SEQ ID NO: 11424 - protein, 155 aa, Zea mays
RFWFVGEREEMAASDVEYRCFVGGLAWATDDHSLNNAFSTYGEVLESKIILDRETQRSRGFGFVTFSTEDAMRSAIEGMNGKELDGRNITVNEAQSRGGRGGGGGGYGGGRRDGGGYGGGGGGYGGGRGGYGGGGGYGGANRGGGYGNNDGNWRN

SEQ ID NO: 11425 - protein, 777 aa, Schizophyllum commune
MATEDALPKLPHRPEPAREKTDGSLDEKIDEKLNNNKGEGFQDEPFELETQAQLDRQHVVTTGQDVSRYVVNLRDDEDPALTFRSLVLGTVIAGLGAALCQIYIFKPVLVSVSTVFLLLLIYCIGNAWAVFLPKRSLVKGTRFERYGGIIEFINPGPFMIKEHVVSTLVASTAAYGATSVNNFAVQRLYYDTHVGPLTAVFATFSTLTFGMGLVGILRPLTVYPAEMVYWSNLPQVTVFQALHFNRHESTKRVRVFWWGFTIMFIYELFPAYIFPLLNSVSIFCLASQKAKPSTRDVFTNIFGGGNANEGLGLLNFSFDWQYIGSNYMSYPLLQQANSWIGLGACYVIMAAIYYSNAWDSKNYKMLSTSIFNHNGTVYDQAAVFGKNGILNETALEEYGLPAMTGSNAWANFAQNLAIGALIAHVTLFWSGDMRDAVLHFRNGKKTNDDPHYLAMQKYKEAPWWWYFILLFLAFIAGLIVCIKGETSLPWWSYIVSLAVGAFITPFSTILYGRMGNGIATNNLMKMIPGALNPGRPVANLYFSMWSHDVVSTSIGLAGDLKVGQYTKVPPRVMFLTQLWGCILGAIVNYVVMISIVDAQREVLLDASGTNVWSGQTIQSLNSQAVTWSLAKELYSASGPYVIVPIGLAIGLVPPFIQWLISKRWPTIKGIKVESIILPIIFNYAQTMSKGITSYVSTSIVIGLVSQLWLRQHHPVWYRKYNYILGGAFDGGAQVMVFILSFAVFGASGVERPFPSWAGNPAKGNIDYCNGNGALDAS

SEQ ID NO: 11426 - protein, 191 aa, Trichodesmium erythraeum IMS101
MTGKKILMIVGDFVEDYEVMVPFQALQMVGHEVDAICPDKKKGDIVRTAVHDFEGDQTYSEKPGHNFTLNASFDDVDPESYDAYDALVVPGGRAPEYIRLNEKVLDIVRHFDSKKKPIAALCHGLQVLAAADVLKGKRCTAYPACAPEVTLAGGTYVEVSVDEAFVDGSLVTGPAWPAIPRWLAEFLKVLQ

SEQ ID NO: 11427 - protein, 318 aa, Oryza sativa (japonica cultivar-group)
MTRRCSHCSHNGHNSRTCPNRGVKIFGVRLTDGSIRKSASMGNLSLLSSAAGSTSGGASPADGPDAAPTAADGYASDDFVQGSSSATRDRKKGVPWTEEEHRRFLLGLQKLGKGDWRGISRNFVVSRTPTQVASHAQKYFIRQSNMTRRKRRSSLFDMVPDESMDLPPLPGGQEPETQVLNQPALPPPREEEEVDSMESDTSAVAESSSASAIMPDNLQSTYPVIVPAYFSPFLQFSVPFWQNQKDEDGPVQETHEIVKPVPVHSKSPINVDELVGMSKLSIGESNQETVSTSLSLNLVGGQNRQSAFHANPPTRAQA

SEQ ID NO: 11428 - protein, 49 aa, Gnetum gnemon
WFFEHFLHPYPTDGDKHILAKQTGLTRSQVSNWFINARVRLWKPIIEEM

SEQ ID NO: 11429 - protein, 386 aa, Saccharomyces cerevisiae; identical to SEQ ID NO: 9553

SEQ ID NO: 11430 - protein, 392 aa, Tristellateia madagascariensis
DLEPVNPADVPVTAAGALKSYKLAAKAISRLQSLPSGNISLLCDVLVKEVRDLTGYDRVMVYKFHEDEHGEVVSECRRSDLESYLGLHYPATDIPQASRFLFMKNKVRMICDCLAPPVKVIQDERLPQPLSLCGSTLRSPHGCHAQYMANMGTIASLVMSVTINEDDDTMDGDQQQMARKLWGLVVCHHTSPRFVPFPLRYACEFLIQVFGVQINKELELAAQVREKHILRIQTMLCDMLLRDAPVGIITQSPNVMDLVKCDGAALFYKNKFWLLGITPTEAQIRDIAEWLLEYHSGNTGLSTDSLMEAGYPGASVLGDAVCGMASVSITSRDFLFWFRSHTAKEIKWGGAKHDPDDKDDGRKMHPRSSFKAFLEVVKWRSLPWEDVEMDAI

SEQ ID NO: 11431 - protein, 80 aa, Triticum aestivum
MMILAIIVLLFSTITVMTSLVALSFYGASQIKFHWVERYDKILVGTVLCLVGVLTYVFHHHDGDEHVHQETPYLPKMHIY

SEQ ID NO: 11432 - protein, 357 aa, Clostridium acetobutylicum
MKEYKVAVIPGDGIGVEIVGEALKVLEKVGAKYDTKFNFTEVKAGGCAIDEFGVPLPNETLEICKNSDAVLLGAVGGPKWDTLPGEKRPEKALMGLRGGLGLYANLRPAKVYDILKSASPLKEEIINKGVDLLVVRELTGGIYFGERGRDIQNGINSAYDTERYNVEEIKRIAHVAFKAALKRNKKVTSVDKANILESSRLWRETVTEVAKEYPEVELNYLYVDNAAMQLVREPSQFDVIVTSNIFGDILTDEASMVTGSIGMLPSASLRNDTFGMYEPIHGSAPDIAGQDLANPLAQILSVAMMLEYSFNMTEAARDVEDAVEKVLNSGYRTGDIYTEGSKKVGTKEMGKLVLAEL

SEQ ID NO: 11433 - protein, 110 aa, Thermococcus celer
  unsure (1)..(110): unsure at all Xaa locations
MKFCPKCGNLMLPDRKRKVWVXRSCGYEEPFDEEKDREKTVIKQEVKHKPDEGIVVIEQDLKTLPTTKITCPKCGNDTAYWWEMQTRAGDEPSTIFYKCTKCGHTWRSYE

SEQ ID NO: 11434 - protein, 247 aa, Zea mays
MMDHQLFDDPFGSSISSLEAEIFSAAAQLPPSPPWPDIDLDDDYDIHDLSAPAANAATSSGGGYGSGGSGGHRKLSHNAYERGRRKQLNELYSSLRSLLPDADQTKKLSIPTTVSRVLKYIPELQKQVDNLERRKKELTNANCKPGVLKTTKAVTPIVSATCLNDTEIMVQVSLHSDVAATALPLSKCIKVLENEGLHLVSSSTYSSAFENKTFYSLHLQRSQRTMKEECPAFCEQLEKIVRKKAGA

SEQ ID NO: 11435 - protein, 144 aa, Chenopodium rubrum
MGSKIFLLLGLSIAFAILISSEVAARELAETAAKTEGYNNGGGYHNGGGGYNNGGGYHNGGGGYNNGGGYHNGGGGYNNGGGYHNGGGGYNNGGGHHNGGGGYNNGGGYHGGGGSCYHYCHGRCCSAAEAKALEATTAQVKPQN

SEQ ID NO: 11436 - protein, 686 aa, Pirellula sp.
MMSTPDTSPSAYNDRPQATTGMPPGIPYIIGNEAAERFSFYGMKAILTVFMVDYLHWMSSAATNQGMSNAEATEHYHTFTAAAYFFPVIGALLSDIFLGKYRTILYLSIVYCIGHGALALMGSPPMSAGMWLFAGLLLISIGSGGIKPCVSAHVGDQFGKSNSHMLTKVYQWFYFSINFGSFISTLLTPWVLEHYGPHWAFGIPGVLMAIATLLFWMGRHKFVHIRPGGYRFLQELLSWEKFSSIPKLMIIFSFVAVFWALFDQTGSSWVLQAKNLNREWLGYTWLESQIQAINPILVLTLIPLFQFLIYPTIDRVFPLTPIRKISLGLFVMIGGFAIVALLQERVDAGSQPSIGWQFLAYAVLTASEVMVSITCLEFAYTQAPKTMKSIVMAVFLFSVSMGNVFTATVNRYIQTPAAASLAADIDLEEDAKEPMDNGSFVGELKLDDPAAPKLTLLGPDNTLGTPDDATLLLNKEGKLDSIENASLTSFNAVAEKIEAYFLDQTGDDSTRAFPSVEEAQPLVAGAEDAFGNPITYKLLSRDQYQLVSAGADGENDTQWDETLTGTVDRANTSDTVNTDAPTFNWLERQKIAIESEGDPNKAETVKSKLISERGGGDETKLSRDYAIGGRTLLEGAAYFWFWTTCIFVTAILFVPVGYLYKEKTYIQDEEDAEHEAEALADEAIST

SEQ ID NO: 11437 - protein, 244 aa, Zea mays
  unsure (1)..(244): unsure at all Xaa locations
MAKNYPTVSAEYSEAVEKARRKLRAXSPLMLRLAWHSAGTFDVSSRTGGPFGTMKHLFYLAHGANAGLDIAVRLLEPIKEEFPILSYADFYQLAGVVAVEVTGGPEIPFHPGREDKPQPPPEGRLPDATKGSDHLRQVFGKQMGLSDQDIVALSGGHTLGRCHKERSGFEGAWTTNPLVFDNSYFKELLSGDKEGLLQLPSDKALLSDPVFRPLVEKYAADEKAFFDDYKEAHLKLSELGFADA

SEQ ID NO: 11438 - protein, 139 aa, Zea mays
  unsure (1)..(139): unsure at all Xaa locations
MVSLKLQKRLAASYLKCGKGKVWLDPNEVSEISMANSRXGFIIKKPHKIHSRSRARRAHDAKQKGRHSGYGKRRGTREARLPTKVLWMRRMRVLRRLLRKYREAKKIDKHMYHDMYMKVKGNAFKNKRVLMESIHKSKA

SEQ ID NO: 11439 - protein, 340 aa, Arabidopsis thaliana
MATGKTSSAANLFTGSTRFDLSSADSPPSKLSLSSDQLNHCHQALGVFRGKIQNPDSIAHEFTGLQANRMWPSELLLNSTVAMNSVNVEKNRYSDVVPFDKNRIVLNPCKDSSAKGYVNASLIKTSESESISQFIATQGPLPHTMEDFWEMVIQQHCPIIVMLTRLVDNNRTVKCGDYFQDEDGPREFGNISLTTKWIKTTDTSLMLRNLEVNYKETEDQPMSVLHIQYPEWPDHGVPKDTVAVREILKRLYQVPPSLGPIIVHCSAGIGRTGTYCAIHNTIQRILAGDMSALDLAKTVALFRKQRIGMVQTMDQYFFCYNAIVDELEDLTAGTNAGTSS

SEQ ID NO: 11440 - protein, 370 aa, Saccharomyces cerevisiae
MAEASIEKTQILQKYLELDQRGRIIAEYVWIDGTGNLRSKGRTLKKRITSIDQLPEWNFDGSSTNQAPGHDSDIYLKPVAYYPDPFRRGDNIVVLAACYNNDGTPNKFNHRHEAAKLFAAHKDEEIWFGLEQEYTLFDMYDDVYGWPKGGYPAPQGPYYCGVGAGKVYARDMIEAHYRACLYAGLEISGINAEVMPSQWEFQVGPCTGIDMGDQLWMARYFLHRVAEEFGIKISFHPKPLKGDWNGAGCHANVSTKEMRQPGGTKYIEQAIEKLSKRHAEHIKLYGSDNDMRLTGRHETASMTAFSSGVANRGSSIRIPRSVAKEGYGYFEDRRPASNIDPYLVTGIMCETVCGAIDNADMTKEFERESS

SEQ ID NO: 11441 - protein, 182 aa, Glycine max
MASAEVEFRCFVGGLAWATDHDALEKAFSQFGEIVESKVINDRETGRSRGFGFVTFATEQAMRDAIEGMNGQNLDGRNITVNEAQSRGKGGGGGGGGYGGGGGGYGGGGGYSRGGGGYGGGGGRREGGYNRNGGGGGYGGGGGGYGGGGGYGGGGRDRGYGGDGGSRYSRGGGGSDGGSWRN

SEQ ID NO: 11442 - protein, 469 aa, Salmonella typhimurium LT2
MVDQVKVAADEQAPAEQSLRRNLTNRHIQLIAIGGAIGTGLFMGSGKTISLAGPSIIFVYMIIGFMLFFVMRAMGELLLSNLEYKSFSDFASDLLGPWAGYFTGWTYWFCWVVTGMADVVAITAYAQFWFPGLSDWVASLAVVILLLSLNLATVKMFGEMEFWFAMVKIVAIVALIVVGLVMIAMHFKSPTGVEASFAHLWNDGGWFPKGISGFFAGFQIAVFAFVGIELVGTTAAETKDPEKSLPRAINSIPIRIIMFYVFALIVIMSVTPWSSVVPDKSPFVELFVLVGLPAAASVINFVVLTSAASSANSGVFSTSRMLFGLAQEGVAPKAFAKLSKRAVPAKGLTFSCICLLGGVVMLMVNPSVIGAFTMITTVSAILFMFVWTIILCSYLVYRKKRPHLHEKSIYKMPLGKLMCWVCMAFFAFVLVLLTLEDDTRQALIVTPLWFIALGLGWLLIGKKRMAGMR

SEQ ID NO: 11443 - protein, 351 aa, Oryza sativa (japonica cultivar-group)
MASNGAAAGAMAPFFPPNFLLQMQQPLPLHHQHLQDHAHGGHGGHHLLPPPPPSLSPFLPDLAMDAPPPPMYEASGGDGGGGGAASEDEEDGCGGGGGGGGGEKKRRLSVEQVRTLERSFESGNKLEPERKAQLARALGLQPRQVAIWFQNRRARWKTKQLEKDFDALRRQLDAARAENDALLSLNSKLHAEIVALKGGAAAAGGGGSSCRQEAASELINLNVKETEASCSNRSENSSEINLDISRPAPPPPPPPANESPVNRGIPFYASIGRGGAGGVDIDQLLLRGGHSPSPAAVTTPPPPKMELGITGNGGGADAAAAGAGSFGGLLCGAVDEQPPFWPWADGHHHFH

SEQ ID NO: 11444 - protein, 301 aa, Clostridium acetobutylicum
MNILVTGGAGFIGSHVVKSLLEHGHKVSVIDNMVHGNSSNLPDEVNIYKYDISEAEIENAFKIERPEVVIHNAAQISVADSVKDPLYDAKVNVLGSINILEMCRKYAVRKVIYPASAAIFGEPKYLPIDEKHPLNMISSYGVSKHTVEHYLNVYKKLYNINYTVLRYSNVYGPGQDSSGEGGVVSIFAEKLTKGEPLCIYGNGNQIRDFVYVKDVTEANILALNSLDNDIYNVSTNTKTTINDLAKLMCEAYGKEVEIMHKGERAGDIFESYMSYDKIYNACGWKPKYDLKLGIKETIQSF

SEQ ID NO: 11445 - protein, 471 aa, Saccharomyces cerevisiae
MSRSLLVENSRTINSNEEKGVNESQYILQKRNVPRTILGNVTNNANILQEISMNRKIGMKNFSKLNNFFPLKDDVSRADDFTSSFNDSRQGVKQEVLNNKENIPEYGYSEQEKQQCSNDDSFHTNSTALSCNRLIYSENKSISTQMEWQKKIMREDSKKKRPISTLVEQDDQKKFKLHELTTEEEVLEEYEWDDLDEEDCDDPLMVSEEVNDIFDYLHHLEIITLPNKANLYKHKNIKQNRDILVNWIIKIHNKFGLLPETLYLAINIMDRFLCEEVVQLNRLQLVGTSCLFIASKYEEIYSPSIKHFAYETDGACSVEDIKEGERFILEKLDFQISFANPMNFLRRISKADDYDIQSRTLAKFLMEISIVDFKFIGILPSLCASAAMFLSRKMLGKGTWDGNLIHYSGGYTKAKLYPVCQLLMDYLVGSTIHDEFLKKYQSRRFLKASIISIEWALKVRKNGYDIMTLHE

SEQ ID NO: 11446 - protein, 250 aa, Triticum aestivum
GPGQFVPGLPPPVPSTSADRVQTRLSKLLMSPRAGKAEQSSGPITRREGEGAGAPSRVHPPMQQLSSSCPIIGQSPLSGQKGGVDWRKLLDPPASTVGGAGLDQQYANVIVSAEELLQMEAEGRQEEANAERAEMYEMLPGKLRAAVRSKLRDWWRDPGPLDAGLAEGWKEAVERIMAWLGPMARDTVQWQSERNMDRTRRFDGGTRVYALQTLRWADKDKAEAAIVEVLVALSCVCWYEERRRGSVRVS

SEQ ID NO: 11447 - protein, 178 aa, Zea mays
  unsure (1)..(178): unsure at all Xaa locations
KQVLSNSGIASISVVLIALVIGGTYRCLDSKESTLVTALIDGVIXHYACYNGDTWSSELDILCKAKPQIITTFKRVRKATIGGVTIDGLFAAPAESSIGLAFVLIGFXTTQCAPNVFWNELLTIPLXTAAALCRSLIDSFLSATVQYSGFYSVRKKVVGVDGPILTRYAYISILSNAS

SEQ ID NO: 11448 - protein, 198 aa, Zea mays
MSHARASPLWRCPLPGTHPHKASASPVRREPPTARPQGACACSRCSFLMATACHLAAPLGLAPLPRGCASAGVVAVVRCARSSGSKIPRGVAVRATSGGEGATEEVPEIVKAAQDAWDKVEDKYAVATIGVAAIVALWTVVGAIKAIDKLPLLPGVLEIVGIGYTGWFTYRNLVFQPDREALIGKIKSTYKEITGSSN

SEQ ID NO: 11449 - protein, 858 aa, Brassica rapa
MQGVRYIYHHFYTSLLVFVVMILFRSALSIYINTLSSTESLTISNNRTLVSPGDVFELGFFTPGSSSRWYLGIWYKKLPYITYVWVANRDNPLSNSTGTLKISGNNLFLLGDSNKSIWSTNLTRGNERSPVVAELLANGNFVMRDSNNNDASGFLWQSFDYPTDTLLPEMKLGYDLKTGLNRFLTSSRNFDDPSSGDYSYKLEPRRLPEFYLLLGDVREHRSGPWNGIQFSGIPEDQKLSYMVYNFTKNSEEVAYTFRMTNNSFYSRLTINSEGYLERLTWAPSSVVWNVFWSSPNHQCDMYRMCGPYSYCDVNTSPSCNCIQGFNPGNVQQWALRNQISGCKRRTRLSCNGDGFTRMKNIKLPDTRMAIVDRSIGLKECEKRCLSDCNCTAFANADIRNRVTGCVIWTGELEDMRNYAEGGQDLYVRLAAADLVKKRNGNWKIISLIVGVSVVLLLLLLLLIMFCLWKRKQNRAKAMATSIVNQQRNQNVLMNTMTQSNKRQLSRENKADEFELPLIELEAVVKATENFSNCNELGRGGFGIVYKGMLDGQEVAVKRLSKTSLQGIDEFMNEVRLIARLQHINLVRILGCCIEAGEKILIYEYLENSSLDYFLFGKKRSSNLNWKDRFAITNGVARGLLYLHQDSRFRIIHRDLKPGNILLDKYMIPKISDFGMARIFARDETQVRTDNAVGTYGYMSPEYAMYGVISEKTDVFSFGVIVLEIVIGKRNRGFYQVNPENNLPSYAWTHWAEGRALEIVDPVILDSLSSLPSTFKPKEVLKCIQIGLLCIQERAEHRPTMSSVVWMLGSEATEIPQPKPPVYCLIASYYANNPSSSRQFDDDEPWTVNKYTCSVIDAR

SEQ ID NO: 11450 - protein, 143 aa, Zea mays; identical to SEQ ID NO: 2031

SEQ ID NO: 11451 - protein, 206 aa, Gossypium harknessii
DVYYWECKGYTPLFPRILGHEASGIVESVGEGVNDLKPGDHVLPIFTGECKECRHCLSEESNNMCELLRINCDRGVMLADGKTRFSINGKPIYHFVGTSTFSQYTVVHVGQVAKISPTAPLDKVCPISCGICTGFGATVNVAKPKKGQTVAVFGLGAVGLAAAEGARVCGASRIIAVDVNPRRFEEAKRFGITEFVNPKDYDKPVQ

SEQ ID NO: 11452 - protein, 342 aa, Hevea brasiliensis
MADLKSTFLKVYSVLKQELLEDPAFEWTPDSRQWVERMLDYNVPGGKLNRGLSVIDSYKLLKEGQELTEEEIFLASALGWCIEWLQAYFLVLDDIMDSSHTRRGQPCWFRVPKVGLIAANDGILLRNHIPRILKKHFRGKAYYVDLLDLFNEVEFQTASGQMIDLITTLEGEKDLSKYTLSLHRRIVQYKTAYYSFYLPVACALLIAGENLDNHIVVKDILVQMGIYFQVQDDYLDCFGDPETIGKIGTDIEDFKCSWLVVKALELCNEEQKKVLYEHYGKADPASVAKVKVLYNELKLQGVFTEYENESYKKLVTSIEAHPSKPVQAVLKSFLAKIYKRQK

SEQ ID NO: 11453 - protein, 270 aa, Hordeum vulgare subsp. vulgare
MEEEGGARKAVLFRLFGVEVRGAEEEEEDDAEPMELKKSTSMPNLASIGPILPRGEASASHDKGYASDDGELASTPQLKRRRRKAQERKRGIPWTEEEHRKFLEGLKQLGKGDWRGISKNFVTTRTATQVASHAQKYFLRQTNPGKKKRRASLFDVGIPAGHGYDDQLPSPHSVGTKLAPAEKILHTDRGDVPLPSYSEVIRGNNNNNTQMQADELTDHAKKRSKFPTGMSLTAMAASGLELAMSSSPSSILELSIGPPRHCAVDAIKVL

SEQ ID NO: 11454 - protein, 462 aa, Oryza sativa; identical to SEQ ID NO: 2334

SEQ ID NO: 11455 - protein, 339 aa, Microscilla sp. PRE1
MKAAFYKEKGKFELGEGKVVVPGPGEVRLDVAYCGVCGTDVHIFHGVMDKRVNPPQTIGHEASAVVAEVGEGVTNVKVGYKVAVRPLRFGEPHPFDKGHAHVGKNLKFIGIDSEGAFQNSWTVPAYTLHQLPDGLSLEHGAFIEPLAVACHDVKIGRVKSGENTLVIGGGPIGTLIAYVLKEKGANVIVSEVNEARLKMLSELGFQTINPLKENLVDRISELTEEKMIDCAFEVSGSAPGVKTMTEVVNVRGRIVMVAIHGGEPKPVDLFKFFWSEIELLGARLYEEDDYEEAIRIAASGNIPFSKLITSKNTLDNIQQIFEEIDQNPAGMKYLIDCQA

SEQ ID NO: 11456 - protein, 886 aa, Bacillus cereus ATCC 14579
MHIYIPTMSYDNKYQVQFEVNTLNLENNVPEKQKENKEEQQDENGNVILDKQLQKYINKYNLNRDNVDAPITKKDLLQIKTLSIYSGKGINKITGLEYMTNLEKLTLRKSNVKDISAISKLRGLKYVDLTSNSIESIHPIEQLENINMLFLRDNKISDLTPLSKMKKIKTLDLIGNNIKDIQPLFTLSTMKQLYLANNQISDLTGIDRLNNVELLWIGNNKINNVESISKMSNLIELEISDSEIKDISPLSQLGNLQVLNLEENYISDISPLSTLTNLHEINLGANEIFDVRPVEELGKRISIDIQRQKIFLNEASVDEEIKIPVYNLKGEPLQNINLQSEGATLNNGFIKWNSPGEKIYEFKLDTNSTESKIRFNGTVIQNIVEKQKESQNVILDKTLQQHINKENLGRENVNAPITKEDLLQIKKLEILKEKGNEIKDITGLEYMTNLEKLTLEGVGLKNIEFISNLKQLNNVNVSHNQIEDITPLSSLENLQWLNLANNHIKDVTVIGSMLNLFSLNLAGNEIRDVRPLIQLGQWFTIDVGRQNIILNDAKINEEIQIPVYDLEGESIENIQLVSEGGTFNNGVIKWSTPGEKVYKFDLDSDEISIRFNGTVIQNIVEKEEEKEPVKEIEETKEEEKEPVKEIEETKEEVKEPVKEVEETKEEVKEPTKEVEEAKEEVKEPTKEVEETKEEVKEPVKEVEEAKEEVKEPTKEVEGVKEEEKEPTKEVEETKEEEKEPVKEVEETKEEEKEPVKEVEETKEEVKEPVKEVKEEVKEPTKEVEEAKEEVDEPTTGVEGSKAEVKETGKKIEGSKDAVNQSAVVQEQNVNNQVVKENKPAVNKQEESKKSLGATGGQENTSTLLSGIALVLSALSMFVFRKRLFKK

SEQ ID NO: 11457 - protein, 443 aa, Leuconostoc mesenteroides subsp. mesenteroides ATCC 8293
MAENKITLSRSLSTKDLVVYGIIFMIPVAPIAFYGSFLSPAHGMVALAYLIGMIAMLFTGFSYASMASEFPYSGSVYTYVQKGTNPVLGFLSGWGITLDYILIPVITYLISASFGQSLLPAVPFWVWILGIAIFNTVINLLGIKVVSKFSWLLFGLQGVVLIAFIVGTIVALANGTVSFNVSSFYNASHFDLSGVVQATGIVIVSYLGFDAISTLSEEANDPTKSIGKAIVLSIILIGSLFVIVTFFAGFVAPNYSELNPDTAFLTILGKVGGSWLVHLAEFTLVLSFGLAGGQEGQTAVSRILYSMGRDGILPKRLSYLHPRYNTPWVAIILVGIVSVALSLSLSLTTVSNLISFGALFGFLSLNIAVIWHFYIKRPDKNIESFVKYLVSPFIGFSVSLWIFLSLALEAKLTGLFWLIIGLVILVYKTSIFKKPVPQFDFSE

SEQ ID NO: 11458 - protein, 119 aa, Triticum aestivum
  unsure (1)..(119): unsure at all Xaa locations
GSRTSGSARTAMDASPELQQFLEQEXQKMVMSXMXTKLTNVCXDKCITSTPGSXFSSXETTXLTXCXQRYLXMIXLFAXRXPYALLAPHNPLVRSLRSPILPPSPSHPPPLPPPPLPPH

SEQ ID NO: 11459 - protein, 332 aa, Schizachyrium scoparium
GYDRVMVYRFHEDEHGEVVAESKRDNLDPYLGLHYPATDIPQASRFLFRQNRVRMIADCHATPVRVIQDPGLSQPLCLVGSTLRAPHGCHAQYMANMGSIASLVMAVIISSGGDDEQTGRGGISSAMKLWGLVVCHHTSPRCIPFPLRYACEFLMQAFGLQLNMELQLAHQLSEKHILRTQTLLCDMLLRDSPTGIVTQSPSIMDLVKCDGAALYYHGKYYPLGITPTESQIKDIIEWLTVCHGDSTGLSTDSLADAGYLGAAALGDAVCGMAVAYITPSDYLFWFRSHTAKEIKWGGAKHHPEDKDDGQRMHPRSSFKAFLEVVKSRSLPW

SEQ ID NO: 11460 - protein, 386 aa, Pseudomonas syringae pv. tomato str. DC3000
MCHLQINMNVIATEHSYQPHGSNGIRWMIRSCLNTAPRLESTHKPLLRGPAMTDLSNRQFLLAKRPSGAVRRDDFTYQQVPVTSLADGQILVRNKFLSLDPAMRGWMNDGKSYIPAVQLGEVMRALGVGEVLESKNPKFAAGDHVQGALGTQDYFAGEPKGFYKVDTSLAPLPLYLSALGMTGMTAYLALLDVGQPKSGDTVLISGAAGAVGSIAGQIAKLKGCRVVGIAGGKDKCSLLTSELGFDAAIDYKSEDVMDAIKRHCPDGVNVYFDNVGGDILDAALSQLAVGARVVICGAISQYNNTTAIKGPANYMSLLVNRARMEGFIVLDHADRFAEAGQVMAGWIKEGKLKSKEHIVEGLETFPETFQMLFNGENQGKLILKVE

SEQ ID NO: 11461 - protein, 106 aa, Oryza sativa; identical to SEQ ID NO: 8096

SEQ ID NO: 11462 - protein, 337 aa, Zymomonas mobilis
MKAAVITKDHTIEVKDTKLRPLKYGEALLEMEYCGVCHTDLHVKNGDFGDETGRITGHEGIGIVKQVGEGVTSLKAGDRASVAWFFKGCGHCEYCVSGNETLCRNVENAGYTVDGAMAEECIVVADYSVKVPDGLDPAVASSITCAGVTTYKAVKVSQIQPGQWLAIYGLGGLGNLALQYAKNVFNAKVIAIDVNDEQLAFAKELGADMVINPKNEDAAKIIQEKVGGAHATVVTAVAKSAFNSAVEAIRAGGRVVAVGLPPEKMDLSIPRLVLDGIEVLGSLVGTREDLKEAFQFAAEGKVKPKVTKRKVEEINQIFDEMEHGKFTGRMVVDFTHH

SEQ ID NO: 11463 - protein, 208 aa, Michelia figo
  unsure (1)..(208): unsure at all Xaa locations
GLVKXAHEISVLCDAEVAVIVFSTKGKLYEYSTDSRMSRILERYERYSYAERELVLSGPESEGSWCLEYGKLKAKVESLQRNLRHFTGEDLDTLSLKELQQLEHQLDAALKHIRSRKNQIMFDSIAELQRKEKSLREQNNMLEKEIQEKEKAMAQQVQWEQQNQSQSSPSFLLPTLNIGTYHRGNEVEEEGARPPARTNSLMPSWMLC

SEQ ID NO: 11464 - protein, 205 aa, Coxiella burnetii RSA 493
MLNAFYSSKFPILNVDDTFFLREQMIKDVEAFFEYYADPDVAHYILASNPRNLAEAAAEITYCHDLFKYRRGIYWTLARKEDDRMIGAIGLYINNQHYRAEICYDLSKHYWNQGIMTKALQVVVDFCFSRIALNRIEAVTLKENAASIAMLKKAGFAHEGSLKNYRYYKGRSHDIEMFAITPEMSSNQKLEKTWARHENFLNLDL

SEQ ID NO: 11465 - protein, 389 aa, Corynebacterium glutamicum
MSTLETWPQVIINTYGTPPVELVSGKGATVTDDQGNVYIDLLAGIAVNALGHAHPAIIEAVTNQIGQLGHVSNLFASRPVVEVAEELIKRFSLDDATLAAQTRVFFCNSGAEANEAAFKIARLTGRSRILAAVHGFHGRTMGSLALTGQPDKREAFLPMPSGVEFYPYGDTDYLRKMVETNPTDVAAIFLEPIQGETGVVPAPEGFLKAVRELCDEYGILMITDEVQTGVGRTGDFFAHQHDGVVPDVVTMAKGLGGGLPIGACLALRAAELMTPGKHGTTFGGNPVACAAAKAVLSVVDDAFCAEVARKQLFKELLAKVDGVVDVRGRGLMLGVVLERDVAKQAVLDGFKHGVILNAPADNIIRLTPPLVITDEEIADAVKAIAETIA

SEQ ID NO: 11466 - protein, 195 aa, Thellungiella halophila
MTKMGFKPDSNPSPNPNESNAKEIRYRGVRKRPWGRYAAEIRDPGKKTRVWLGTFDTAQQAARAYDAAAREFRGAKAKTNFPTFLELNAAKDGGFARSPSQSSTVDSVSPTSARLVTPPQLELSLGGGGGGACYQIPVARRPVYFYNMTTFPAAAAATCGVQSESDSSSVVDFECGAEKKYRPLDLDLNLAPPAE

SEQ ID NO: 11467 - protein, 333 aa, Zea mays
  unsure (1)..(333): unsure at all Xaa locations
MSALKKSDKKAALDFAAWSFNVTTSVGLIMVNKALMATYGFSFATTLTGLHFVTTTLMTIVFRWLGLSQPSHLPLADLVKFVIFSNLSIXVGMNVSLMWNSVGFYQIAKLCMIPASCLLEVVFDHVHYSRDTKLSIMVVLIGVAVCTVTDVSVNARGLIAAVIAVWSTALQQYYVHFLQRKYSLNSFNLLGHTAPAQAGSLLLVGPFADYLLTGKRVDHFSFSSLALFFLALSCFIAMGVNLSQFICIGRFSAVSFQVLGHMKTVLVLSLGFLFFGKEGLNLQVVLGMVLAVLGMIWYGNASAKPGGKERRSILPVRSASLKGSSEEKAGAEK

SEQ ID NO: 11468 - protein, 350 aa, Helicobacter pylori J99
MRVPSKGFAIFSKDGHFKPHDFSRHAVGPKDVLIDILYAGICHSDIHSAYSEWKEGIYPMVPGHEIAGVIKEVGKEVKKFKVGDVVGVGCFVNSCKTCKPCKEHQEQFCANHKTVFTYDCLDYFHDNEPHMGGYSNNIVVDENYVISVDKNAPLEKVAPLLCAGITTYSPLKFSKVTKGTKVGVAGFGGLGSMAVKYAVAMGAEVSVFARNDHKKQDALNMGVKHFYTDPKQCKEELDFIISTIPTHYDLKDYLKLLTYSGELALVGLPPVEVAPALNVFEFIHLGNRKVYGSLIGGIKETQEMMDFSIKHNIYPEVDLILGKDIDTAYHNLTHGKAKFRYVIDMKKSFD

SEQ ID NO: 11469 - protein, 169 aa, Leavenworthia stylosa
NTERVGMIHDGESRFSIKGKPIHHFLGTSTFSEYTVVHSGQVAKINREAPLDKVCIVSCGLSTGLGATLNVAKPKKGQSVAVFGLGAVGLGAAEGARIAGASRIIGVDLNSNRFEQAKKFGVTEFVNPKEHDKPVQQVIAEMTNGGVDRSVECTGSVQAMIQAFECVHD

SEQ ID NO: 11470 - protein, 185 aa, Microbulbifer degradans 2-40
MEATVANSNPVRTFKNITPSLGERVFVDPAAVVIGDVHLGEDASVWPCAVIRGDMHRIRVGARTSVQDNAILHITHASSFNPDGWPLIIGDDVTIGHGACLHGCTVGNKVLVGIGATVLDGAIVEDEVIIGAGSLVPPGKRLQSGFLYVGSPVKQARPLKDSEKAFFAYSAQNYVKLKDEYLGDS

SEQ ID NO: 11471 - protein, 489 aa, Zea mays
  unsure (1)..(489): unsure at all Xaa locations
APPLATARTQAATRPRLRRPPRPAPAGRRIPPASSMPWVRNLRRFVDTGAGLGSEALMELETKRILLEIFKERXRKSAEAGSIPSFYKKKPEEGSISSRVQRLAKYRFLKKQSELLLNADDLDAMWVCLRENCVIDDATGAEKMNYEDFCHIATVCTEQIGQKCKRFFSPSNFMKFEKDDSGRIAILPFYLYVMRTVSLTQARIDMSELDEDSDGFLQPHEMEAYIRGLIPNLAQLRDMPTAFVQMFCRIAAHKFFFFCDPHKRGKACMKKVLLSNCLQELMELHQESEEEVTDVEQAENWFSLTSAQRICDMFLALDKDTNGTLSKQELKEYADGTLTEIFIERVFDEHVRRSKVGGGNSREMDFESFLDFVLALENKDTPEGLTYLFRCLDLNGRGFLTTADIHTLFRDVHQKWIEGGNYELCIEDVRDEIWDMVKPADPLRISLSDLLSCKQGGTIASMLVDVRGFWAHDNRENLLQEEEEQVEET

SEQ ID NO: 11472 - protein, 361 aa, Hordeum vulgare
MAHARVLLLALAVLATAAVAVASSSSFADSNPIRPVTDRAASTLESAVLGALGRTRHALRFARFAVRYGKSYESAAEVRRRFRIFSESLEEVRSTNRKGLPYRLGINRFSDMSWEEFQATRLGAAQTCSATLAGNHLMRDAAALPETKDWREDGIVSPVKNQAHCGSCWTFSTTGALEAAYTQATGKNISLSEQQLVDCAGGFNNFGCNGGLPSQAFEYQYNGGIDTEESYPYKGVNGVCHYKAENAAVQVLDSVNITLNAEDELKNAVGLVRPVSVAFQVIDGFRQYKSGVYTSDHCGTTPDDVNHAVLAVGYGVENGVPYWLTKNSWGADWGDNGYFKMEMGKNMCAIATCASYPVVAA

SEQ ID NO: 11473 - protein, 230 aa, Oryza sativa (japonica cultivar-group)
MEMDIGEGESCCGRRKQQQQQNISSSKSRKCCPLRRSRKGCMKGKGGPENQRCPFRGVRQRTWGKWVAEIREPNRGARLWLGTFNTALDAARAYDSAARALYGDCARLNLLLAAATAGAPPAAATPSVATPCSTNDDSNNSSSTTHQQQLTTMLQLDDDNYTLQPSSSDQEDFETYVTRLPKAEDFGLEGFQEVPLDVLDEAGGGISIWDLSICPADFMATAATTTAKSS

SEQ ID NO: 11474 - protein, 357 aa, Zea mays
MSCLACCGGEDTQRTPDNGGPYPGGYPPRDDAYRTADPTPRGAQPLKMQPITVPTIPVEEIREVTVAFGDEALIGEGSFGRVYFGVLKNGRSAAIKKLDSSKQPEQEFLAQVSMVSRLKHGNVVELLGYCVDGNTRILAYEFATMGSLHDMLHGRKGVKGAQPGPVLSWTQRVKIAVGAAKGLEYLHEKAQPHIIHRDIKSSNVLLFDDDVSKIADFDLSNQAPDMAARLHSTRVLGTFGYHAPEYAMTGQLSSKSDVYSFGVVLLELLTGRKPVDHTLPRGQQSLVTWATPRLCEDKVRQCVDSRLGVEYPPKSVAKFAAVAALCVQYEADFRPNMSIVVKALQPLLNARASNNPG

SEQ ID NO: 11475 - protein, 298 aa, Chamaecyparis nootkatensis
MKEIVQKMGDPSVEVTEEQRGSAQVAKGKAMEAMSNGDLEEAINHLTEAIMCNPTSAILYANRAGVYVKMRKPNAAIRDANAAININPDSAKGHKARGMARAMLGNWEEAAKDLHLASSLDYDEEIAIVLKKVKPNAHKIEEHHRKYERLRKERDDRKKESDRQRRRAEAQAAYEQAKKQEQSSTGRKSGGMPGGFPGGMPGGFPGGMPGGFPGGMPGGMPGGMPGGMPGGMPGGMPGGMPDMSKILNDPEMMAAFKDPEVMAALQDVMKNPANMAKHQANPKVAPIIAKMMSKFSGA

SEQ ID NO: 11476 - protein, 310 aa, Glycine max
  unsure (1)..(310): unsure at all Xaa locations
MSNSRNTHWCYSCRRPVWLGRRDAVCPSCNEGFVHELNDMVHVNPFDLFEMDNNEERDQRLGLMETFSAFMRHQMADRGRSHDIRAQTDSNPEHSAGFAPLLIFGGHIPFRLSRHGGFEALFNGAPGXIGLTQGNTGDYFIGPGLEELFEQLSANNRQGPLPASRSSIDAMPTIKIVQRHLRSDSHCPVCKDKFELGSKARQMPCNHLYHSDCIVPWLVQHNSCPVCRQELPPQGLSSSNRGANGRSRSASLSSSGRESHGRRNPFSFLWPFRSSHSSSNDEATGSSSPTPTIPENSHHHHAGYSGWPFE

SEQ ID NO: 11477 - protein, 800 aa, Saccharomyces cerevisiae
MASVPKRHTYGGNVVTDRDRHSLQRNNEILHPIHKNQRKHATFGPYIIGSTLGEGEFGKVKLGWTKASSSNEVPKQVAIKLIRRDTIKKDADKEIKIYREINALKHLTHPNIIYLEEVLQNSKYIGIVLEFVSGGEFYKYIQRKRRLKESSACRLFAQLISGVNYMHYKGLVHRDLKLENLLLDKHENLVITDFGFVNEFFEDNELMKTSCGSPCYAAPELVVSTKAYEARKADVWSCGVILYAMLAGYLPWDDDHENPTGDDIARLYKYITQTPLKFPEYITPIPRDLLRRILVPNPRRRINLQTIKRHVWLKPHEAFLSIQPNYWDEHLQKERPKPPNKGDVGRHSTYSSSASSYSKSRDRNSLIIESTLEQHRMSPQLATSRPASPTFSTGSKVVLNDTKNDMKESNINGERTSASCRYTRDSKGNGQTQIEQVSARHSSRGNKHTSVAGLVTIPGSPTTARTRNAPSSKLTEHVKDSSQTSFTQEEFHRIGNYHVPRSRPRPTSYYPGLSRNTADNSLADIPVNKLGSNGRLTDAKDPVPLNAIHDTNKATISNNSIMLLSEGPAAKTSPVDYHYAIGDLNHGDKPITEVIDKINKDLTHKAAENGFPRESIDPESTSTILVTKEPTNSTDEDHVESQLENVGHSSNKSDASSDKDSKKIYEKKRFSFMSLYSSLNGSRSTVESRTSKGNAPPVSSRNPSGQSNRSNIKITQQQPRNLSDRVPNPDKKINDNRIRDNAPSYAESENPGRSVRASVMVSTLREENRSELSNEGNNVEAQTSTARKVLNFFKRRSMRV

SEQ ID NO: 11478 - protein, 183 aa, Salmonella enterica subsp. enterica serovar Typhi
MQNSLLNTHVTTIDGEVTTLEKYAGKVLLIVNVASRCGLTPQYEQLENIQKAWADQGFVVLGFPCNQFMGQEPGSEEEIKTYCASTWGVTFPMFSKIDVNGDARHPLYQKLIAAAPTAVAPEKSGFYERMVSKGRTPLYPDDILWNFEKFLVGRDGQVVQRFSPDMTPEDPIVMESIKIALAK

SEQ ID NO: 11479 - protein, 284 aa, Lactobacillus plantarum WCFS1
MANIQWYPGHMAKAIHQIQDNLHLVDIVFELVDARIPVASRNPEIEKTVQQKPHLLIMTKKDLADPQATADWVKYYEDQGQVAIAVDSRSRTIGKQMTQAASDMLADKLAKIAARGITNRPIRAVCVGIPNVGKSTLLNHIVNKKIAKVGDRPGVTKGQQWLKASNKLELLDTPGILWPKFEDQVVGTKLAVTGAIKENIYPNDDVALFALDFFKQHYAARLVDRYHLTAEQLTLPNPELLIAMTKNAGMRDDWERFCVAFLLDIRKGRLGRFTLDLTGDQPDA

SEQ ID NO: 11480 - protein, 73 aa, SINNINGIA ARANEOSA
ISGTNGEVMPGQWEFQVGPSVGIEAGDHIWCARYLLERITEQAGVVLSLDPKPIEGDWNGAGCHTNYSTKSMK

SEQ ID NO: 11481 - protein, 437 aa, Yersinia pestis KIM
MAYQQERIMSHRELEQRRKEATPRGIGVLCDFYAVRAENATLWDEQGREYIDFTAGIATLNIGHRHPKVMAAVRQQLDQFTHTAYQVVPYASYVTLAEKINSLAPISDSNMTAAGNSKTAFFTTGVEAIENAVKIARAATGRPGVIAFSGAFHGRTLLAMALTGRAVPYKVGFGPFPASIFHALYPNELYGVSVEEAISSVERLFRCDISPTQVAAILFEPIQGEGGFNIAPPEFVSALRTLCDEHGILLIADEVQTGFARTGKLFAMEYYPDTKVDVITMAKSLGGGMPISAVTGRADIMDAPLPGSLGGTYAGNPLAVAASLAVLDIIAEEKLCERALILGAKLVDVLEKAQMSNAAIVGIRARGSMVAVEFNDPVSGKPSPELTRAYQRQALEEGLLLLSCGVHSNVIRFLYPLTIPDKQFKQAMNILTRLLAS

SEQ ID NO: 11482 - protein, 187 aa, Streptomyces avermitilis MA-4680
MVSGAAGAVGSVVGQIARIHGCRVIGVAGGPEKCRTIVDEFGCDVAIDYKSENLRDALRKHAPDGVDVYFDNVGGKTLDSVLTRLARGARIVICGSMSQYNATERPPGPANYMALLAARASMTGMVVFDYEDRYPQASAELARWLKDGRLRSREHIVEGGVRAFPETLLKLFSGENTGKLILALGNG

SEQ ID NO: 11483 - protein, 266 aa, Pisum sativum
MLELRLVQGSLLKKVLESIKELVNDANFDCSSTGFSLQAMDSSHVALVALLLRSEGFEHYRCDRNLSMGMNLNNMAKMLKCAGNDDIITIKADDGSDTVTFMFESPTQDKISDFEMKLMDIDSEHLGIPEAEYHAIVRMPSAEFARICKDLSSIGDTVVIAVSKEGVKFSTKGDIGSANIVCRQNTTVDKPEEATVIEMNEPVALQFALRYMNSFTKATPLSSSVTISLSNELPVVVEYKIAEMGYVRFYLAPKIEEDEEETKPQA

SEQ ID NO: 11484 - protein, 368 aa, Brassica oleracea
MDRLKLSLSVFALLFIVVSASSDGNEGDDLVIKQVVDGGAEPNVLSSEDHFSLFKKKFGKVYASREEHDYRFSVFKSNLRRARRHQKLDPSARHGVTQFSDLTRSEFKRKHLGVKGGFKLPKDANKAPILPTENLPEEFDWRERGAVTPVKNQGSCGSCWSFSATGALEGANFLATGKLVSLSEQQLVDCDHECDPEEAGSCDSGCNGGLMNSAFEYTLKTGGLMREEDYPYTGKDGATCKLDKSKIVASVSNFSVISIDEEQIAANLVKNGPLAVAINAAYMQTYIGGVSCPYICMRRLNHGVLLVGYGSAGYAPARFKEKPYWIIKNSWGETWGEDGFYKICRGRNVCGVDSLVSTVTATVSPAAH

SEQ ID NO: 11485 - protein, 202 aa, Triticum aestivum
MLLPTRRLPAAPSRPSVHPYISPARPSLRFRPQYGRAATARATSATPPVFGDTLLGLYEKERLGLSRYADEESREDVFWETLDADLQYWTRSLRPGQWYPGHIAKTEKELKGQLKLMDVAIEVRDARIPLATTHPKMDSWLGNRRRIIVMNREDMVSADDRNAWATYFSSQGIKVIYSNGQLGMGTMKLGRMAKSAASRGIY

SEQ ID NO: 11486 - protein, 152 aa, Oryza sativa; identical to SEQ ID NO: 9381

SEQ ID NO: 11487 - protein, 230 aa, Triticum aestivum
KKRKKRKATGHTRHGLAQRDDDGNDGGVGTHYHGVRKRPWGRYAAEIRDPAKKSRVWLGTYDTAEEAGRAYDAAAREYRGNKAKTNFPFAPASAPPAAAAALTVDGSRSSNSSTVESFGGDVQAPMQAMPLPPSLDLDLFHRAATSTAGAGMRFPFSGYPVSHPYYFFGQAAAAAAAGCHMYSQAPKVTVASVSPSDSDSSSVVDLAPSPPARKPVPFELDLNCPPPAEL

SEQ ID NO: 11488 - protein, 391 aa, Heliobacillus mobilis
MNTYGRLPIALVKGEGAKVWDADGREYLDFLAGLAVNSLGHCHPKVTEAVKAQVDQLIHVSNLYWIEPQIELAQSLVENSFADKVFFCNSGAEANEGAIKLARKYAKLHMGPDKYEIITMEKSFHGRTLATVTATAQPKYQKAFTPLPEGFRYVPFGDLKALEKAIGPHTCAIMVEPVQGEGGVNLAEPAFWEGLAKLAKEQNLLLIFDEVQSGLGRTGKLFAHEHYGITPHIMTLAKALGGGTPIGALLATDEVASAFEPGDHASTFGGNPLVTAAGVATMDVLVQGGLLAHCLEMGAYFRGHLNRLAEKYTFIQEVRGLGLILACELDRPGADIVAACLEKGLIINCTAVNVLRFLPPLIITKEDIDHAVAILEEVLASVEANAGGTPA

SEQ ID NO: 11489 - protein, 88 aa, Zea mays
MRSWLVVQALERADESQKRILFENYGKKDPACVAKVKNLYKELDLEAVFQEYENESYKKLIADIEAQPSIAVQKVLKSFLHKIYKRQK

SEQ ID NO: 11490 - protein, 406 aa, Populus nigra
MGFLCFSGKSSKRSENSSIDENNSNIKRKDQTQLTSGSMKVKPYVNDSREEGASKDDQLSLDVKSLNLKDEISKDIRNNGNPAQTFTFEELVAATDNFRSDCFLGEGGFGKVYKGYLEKINQVVAIKQLDQNGLQGIREFVVEVLTLSLADNPNLVKLIGFCAEGDQRLLVYEYMPLGSLENHLHDIPPNRQPLDWNARMKIAAGAAKGLEYLHNEMAPPVIYRDLKCSNILLGEGYHPKLSDFGLAKVGPSGDHTHVSTRVMGTYGYCAPDYAMTGQLTFKSDVYSFGVVLLELITGRKAIDQTKERSEQNLVAWARPMFKDRRNFSGMVDPFLQGQYPIKGLYQALAIAAMCVQEQPNMRPAVSDVVLALNYLASHKYDPQIHPFKDPRRRPSHPGLDKDNGRT

SEQ ID NO: 11491 - protein, 150 aa, Triticum aestivum
  unsure (1)..(150): unsure at all Xaa locations
MVNLTTQKRLAASVARCGERKIWLDPNEISEISNANSRQTIRKLIADGLIIKKPVTMHSRSRARELAAARKLGRHRGFGKRKGTADARMPSQVVWMRRLRVLRRLLVKYRASGKIDKHLYHELXHLSXGNXFKHKRAIIXQXHRAKXKKA

SEQ ID NO: 11492 - protein, 248 aa, Glycine max
  unsure (1)..(248): unsure at all Xaa locations
FYFSPGIMLLIYAKASSHVPLKILSIEDGTVLKSFSHLLYRNKKVDFIEQFNEKLLVKQENENLQILDVRTFDXTEVCRSEFMTPSAFIFLYENQLFLTFRNRTVAVWNFRGELVTSFEDHLLWHPDCNTNNIYITSDQDLIISYCKADSDDSLSEGNAGSINVSNILTGKCLAKIRASNSFPVDNNCSCSDKPSRSYCCNSKKRKHGSKMRSTVAEALEDITALFYDEERNEIYTGNRLGLVHVWSN

SEQ ID NO: 11493 - protein, 368 aa, Malus x domestica
MGKGGQSCNGMVRDVKPVEKENMAAWLVDVNTIKILPFKLPTIGPNDVQIRIKAVGICGSDVHYLKTMKCADFEVKEPMVIGHQCAGIVDKVGSEVKHLVPGDRVAVEPGISCAHCQQCKGGRYNLCPDMKFFATPPVHGALANQIVDPADLCFKLPENVSLEEGAMCEPLSVGVHACRRANVGPETTVLIVGAGPIGLVSVLAARAFGAPRIVIVDMDSKRLAVAKSLGADGTVKVSRKMEDLDDEVAKIKETMGAEVDVTFDCVGFNKTMSTGLNATRPGGKVCLVGMGHSMMTVPLTAAAAREVDVVGVFRCKNTWPLCLEFLRSGKIDVKPLITHRFGFTEKEVEEAFATSARGGDAIKVMFNL

SEQ ID NO: 11494 - protein, 446 aa, Glycine max
  unsure (1)..(446): unsure at all Xaa locations
MAQQQEDEMEYVADDNEMAEVEDDMYFRGRVFGDSESESDDDDEYDSMENRMTDTSAAEARKGKDIQGIPWDRLSISREKYRQTRLEQYKNYENIPQSGEQSEKECTPTHRGGKYYDFWQNTRSVKSTILHFQLRNLVWATSKHDAYLVSSYSIIHXSSLNSKRSEILNVSGHVAPCEKHPGSLLEGFTQTQISTLAVRDKLLIAGGFQGELICKYVDRPGVSFCSRTTYDDNAITNAVEIYEHPSGAVHFMASNNDCGVRDFDMERFQLSKHFSFSWPVNHTSLSPDGKLVVIVGDNPEGLLVDSQTGKTITPLRGHLDYSFASAWHPDGRIFATGNQDKTCRVWDVRNLSKSVAVLKGNLGAIRSIRFTSDGRFMAMAEPADFVHVYDAQSGFEKEQEIDFFGEISGVSFSPDTESLFVGVWDRTYGSLLQYNRRRNYMYLDCM

SEQ ID NO: 11495 - protein, 580 aa, Schizosaccharomyces pombe
MEPEYVSFSDKDTKSILNESKSSLKDVKPSLEEKSYITPGLVDDVEPKGKNFVVRFFDDFKPAKATGEDGTALKRSLKSRHMQMISIGGAIGTGLYVGSGSSLADGGPASVIINYSLIGIMMFFIVYALGEMAVAYPVAGGFNTYATRFIDPAWGFAVSWNYFINYFVTFPLELTTCAITFRYWTDINSAAWISIFLVVIIIVNLFGVRAYGEVEFILSTVKVVATFGFIILAIIINCGGVPTDHRGYIGGSIIKHKPFRHGFKGFCSVFTTAAFSFSGTEVIGLAAAEVDNPQKALPHAVKQVFWRIAIFYVVSLILIGLLISPDDPNLMGNGSTSVSPFVLAIKEANIKGLPSVFNAVIIISVVSVTNSSTYTAGRTLHGMANLKQAPSFFKYTDRLGRPLLAMIVVLLFGFFAYINEADKNGNDVSDTVFNWLLALSGLSNFFTWGSICLCHIIFRLAFKKQGHSLKELGFVSPMGIWGSCIGLFFNILCLMAQFYVSLFPIGGKPNANDFFQGYLAAPVTLAFFIGYKIYDRSHIPSLDKLDITTGLKTYENLDEEEDEPTTASKRIFKKISSVFC

SEQ ID NO: 11496 - protein, 578 aa, Zea mays
  unsure (1)..(578): unsure at all Xaa locations
MASAAAAAVAPAAEEKKGAGGPVTGDMVSAGFAELERQQRLLATCTRLYQHLSDHIGSLERGLAARSDALRVRRRAFDARTHRALDSLHRREASIDASVSRALDHLHSISAKGSPPAPDPAHAAGAGAAEGLRALCARMDSAAFLGFVVARRKEADALRAEMPAALKLCVDPAKFVMDAVADVFPVDRREARSPADLAWACVLILEAAVPALTDPDPDIGPARPLVPRAACERARGMAREWKDAAEKKGXVEGAKPPDAHAFLQHVATFAVAEKEDMPLYRRIVVSFSWRRQMPRLALTLGLEEEMADIIEELIAKRQQLDAVNFAYEAGLQEKFPPVPLLKSYLEVPSSAPAAAAAWASTSSSGQSGSNANKKEQSALRAVIKCVEDRNLEAEFPLEGLRKQLEELEKAKTEKKKAASSATSGGSSSGPATKRIRASNGGPMPPAKAGRLATNACASSFPGPTTFTQSPSHAPHANTSSPSHASHAATASPSHTSYATPPPYPVGHGLYCSRSPPVIRGEPYAYPPAEEVVGFHVGITMPLLTPPMSYPPAPYGGYGSGMAAYANGMAPAFHQAYYR

SEQ ID NO: 11497 - protein, 832 aa, Schizosaccharomyces pombe
MMEHDVEDLINQLDISEKAMLLSGTDLWHTAAIPRLNIPSIRLSDGPNGIRGTSFFNSSPSACFPCGTALGATFDKKLLFEVGEYLAEEAKAKGVSVVLGPTVNIHRGPLNGRGFESFSEDSTLSGLAASYVILGLQSKNVQACIKHFVCNDMEDERNSVSIDVSQRALREVYLMPFQLACKYSNFKSLMTSYNKVNGEHVSQSRILLDNILRKEWEWKGTIISDWFGTYSLKKAIDAGLDLEMPGKPRFRNVNTIQHLVGSKELSESILDERAKNVLKLVKHSWQNTEAENHCELNNDSSCLREALKKFASQSIVLLKNKKKLLPLSRKGTFAVIGPNAKVCNYSGGGSANLKPYYTVSMYDGIAAKIDGVPEYALGCHNYLNLPNIANLLVNPRTGKHGYVAKFYLEPATSENRTLIDDYDLEDGVVRFYDYCNDKMKDGYFYIDIEGYLIPDEDAVYEFGISVFGTALLFIDDVLLIDNKTKQTPTNHTFEFGTIEERNSIYLKKGRKYNVRVEYGSAATYTLSTNLSPSTGGRYSIGCVKVIDPETEIDYAVRVAKSVDCVILCVGLTAEWETEGEDRKTMTLPSLSDKLVYSILQSNPNTVVVTQSGTPIEMPWISEAHTLLHIWYNGNELGNALANIIFGEQNPCGKLPITFPKKLKDNPAYLSFRSSRGHCVYGEDVFVGYKYYEAVEREVLFPFGYGLSYTTFELSNLYLKNCGERLRIDLEISNTGPMSGAEIIQVYISQIVRSVNRPVKELKEFSKVVLCPKETKLIRIELDIKYATSFYDELNEKWCSEEGEYNVLVGTSSKDIALTGKFTLPKTIHWTGL

SEQ ID NO: 11498 - protein, 152 aa, Zea mays
MVKAVAVLNSSEGVTGTIFFTQEGDAPTTVTGNISGLKPGHHGFHVHALGDTTNGCMSTGPHFNPAGKEHGAPEDEHRHAGDLGNITVGDDGTATFTTVDKQIPLTGPNSIIGRAVVVHADPDDLGKGGHELSKSTGNAGGRVACGIIGLQG

SEQ ID NO: 11499 - protein, 484 aa, Staphylococcus aureus subsp. aureus N315
MEDNKMNRSLNSRHISMIAIGGAIGTGLFVATGNIISQAGPGGAILAYLVIGVMLYFLMSSIGELATFYPVSGSFSSYSTRFIDSSLGFTMGWLYWALWSLVTSVDVIVASNVLYFWDTFKFFHPITWSLIFITILLLLNIFSVKSFGETEFWLSLIKVLTIIVFVIFGFLMIFGILGGHTYGFENYTKGQAPFVGGISGFLGVLLVAGFSVGGTEVVAVTAGESDDPKKSMPKAIKQVFWRILLFYVLSIAVIGAIIPYTDPSLLRASSSISQSPFTIVFDRVGIAFAASVINAVILTSLLSAANSGVYTTGRMLYSLSSDKKAPQFLSKLNKTTKLPLRALLTTYAVVVIVIIYANFNSNAVFNLLEIIGSMIIVVWGSSIWSQIRLRQAIKKQGQDPNKVLPYKAPFYPLGPIIVITTLLFLLFGGSVEYILKDQWLNAFKNFLPLIILALIYFIHKIIHKTKFVKLETINLKPHDYDNQK

SEQ ID NO: 11500 - protein, 514 aa, Lycopersicon esculentum
MDGTAVQGTSSVDSFLRNYKLGKTLGIGSFGKVKIAEHTLTGHKVAVKILNRRKIRNMDMEEKVRREIKILRLFMHPHIIRLYEVIETPSDIYVVMEYVKSGELFDYIVEKGRLQEDEARNFFQQIISGVEYCHRNMVVHRDLKPENLLLDSKWNVKIADFGLSNIMRDGHFLKTSCGSPNYAAPEVISGKLYAGPEVDVWSCGVILYALLCGTLPFDDENIPNLFKKIKGGIYTLPSHLSAGARDLIPRMLIVDPMKRMTIPEIRLHPWFQAHLPRYLAVPPPDTTQQAKKIDEEILQEVVKMGFDRNNLTESLRNRVQNEGTVAYYLLLDNRHRVSTGYLGAEFQESMEYGYNRINSNETAASPVGQRFPGIMDYQQAGARQFPIERKWALGLQSRAHPREIMTEVLKALQELNVCWKKIGQYNMKCRWVPSLPGHHEGMGVNSMHGNQFFGDDSSIIENDGATKLTNVVKFEVQLYKTREEKYLLDLQRLQGPQFLFLDLCAAFLAQLRVL

SEQ ID NO: 11501 - protein, 266 aa, Glycine max
MLELRLVQGSLLKKVLESIKELVNDANFDCSSTGFSLQAMDSSHVALVALLLRSEGFEHYRCDRNISMGMNLNNMAKMLKCAGNDDIITIKADDGSDTVTFMFESPTQDKISDFEMKLMDIDSEHLGIPEAEYHAIVKMPSSEFARICKDLSSIGDTVVISITKEGVKFSTKGDIGTANIVCRQNTSVDKPEEATVIEMNEPVSLTFALRYMNSFTKATPLSNTVTISLSNELPVVVEYKIAEMGYVRFYLAPKIEEDEEDTKPQV

SEQ ID NO: 11502 - protein, 353 aa, Azotobacter vinelandii
MSYQVTIEPTGEQIEVREGQTILQAALRQGIWLPFACGHGTCATCKIQVLEGEVDIGAASSFALMDMERDEGKVLACCAIPRSDLIIEADIDVDPDFAGHPVQDYRATVSSILDLSPTIKGVHFELDRPMAFQAGQYVNLQLPGIEGSRAFSIANPPSRADAVELHVRLVEGGLATTHIHRQLEVGDTAEISGPYGQFFVRESHPGGLIFIAGGSGLSSPQSMILDLLERGDTRPMALFQGARNRAELYNRALFERLAAEHANFTYVPALNQAGDDPEWTGFRGFVHDAAKAHFENRFQGNKAYLCGPPPMIDAAITTLMQGRLFERDIHMERFYSAADGASEGQRSALFKRI

SEQ ID NO: 11503 - protein, 434 aa, Oceanobacillus iheyensis HTE831
MNKSDQHWQELVNSIGNFLAPSMAKDHPNLPVVKAEGCYYYGTDGKEYLDFTSGIAVENVGHRHPKVVQAIKDSADHLVHGPSGVIIYESILKLAQELQEIMPPKLDNFFFANSGTEAIEGGLKLAKHVTKRPYVISFTGNFHGRSIGSLSVSTSKSKYRKYQQPSWLTYQLPYALPEYLPEGQDPEVFFAEKLEKDAESLFKHQVDPEEVACMILEPIMGEGGYIIPPKSWLQKVREICDRHGILLIFDEVQTGFGRTGDWFAAQTFGVTPDIMAIAKGIAAGMPLSATVASKELMDQWPLGSHGTTFGGNPIACAAARASLSIMKEEKLLNNAKTMGDYALTKLSGLKDKYEIVHEVRGIGLMLGIELRDPETGEPDGEAVMKALNGCLDEGVLFYLCGNAGEVIRMIPPLTINKEQIDQGIDVLDKVLAQM

SEQ ID NO: 11504 - protein, 135 aa, Zea mays
  unsure (1)..(135): unsure at all Xaa locations
LGTSRPAGFNFFNPPQVPEDDDDIDEDTADELQSQMEHDYDIGTTIRDKIIPHAVSWFTGEAVQGEDFGELGDDDEDDDDEDDDEDDEDEEEDDDEEEDDEEESKPXKSGSGRRHKVPQKVSQGNAEQPAECKQQ

SEQ ID NO: 11505 - protein, 633 aa, Oryza sativa
  unsure (1)..(633): unsure at all Xaa locations
LSSSPPKLWSIPSTRRLAAVDTPEKPYEGKPAAEARSYWRWQKEDFFPEPSFASWGAYRAALAATPARFRDRFAGRSTDADELGALRRRSENEMRRCLTWWDLTWFGFGSVIGAGIFVLTGXRDAHDHAGPAIVLSYVASGLSAMLSVFCYTEFAVEIPVAGGSFAYLRVELGDVAAFIAAANLILESIIGTAAVARSWTSYLASLINKPASALRIQTSLAEGYNELDPIAVVVIAVTATLAILSAKGTSRVNWVASAVHVLVIAFVIVAGFLHAKTSNLTPFMPHGVPGVFRAAAIVYFAYGGFDNIATMAEETKNPSRDIPLGLLGSMSVITAIYCVMALVLSMMQPYTAIDRSAAYSVAFSNVGMRWAQYVVALGALKGMTTVLLVGALGQARYTTHIARSHIIPPVFALVHPRTGTPVHATVLIAAAGACIGLFSSLDVLSSLLSVSTLFIFMMMATALLVRRYYVRGVTSRTHARRLVALLSVVIGSSAGIAAYWGAAPERWVGYTVLVPAWAAGTLGIQLLVPAARAPKVWGVPLVPWLPSLSIATNLFLMGSLGAQAFIRFGVCTAIMLLYYVLVGLHATYDVAHGACSGDDVDEEVYADAAHVDDAKAAAAVAANADVERAGAKI

SEQ ID NO: 11506 - protein, 266 aa, Eubacterium sp.
MRLKDKVILVTASTRGIGLAIAQACAKEGAKVYMGARNLERAKARADEMNAAGGNVKYVYNDATKEETYVTMIEEIIEQEGRIDVLVNNFGSSNPKKDLGIANTDPEVFIKTVNINLKSVFIASQTAVKYMAENGGGSIINISSVGGLIPDISQIAYGTSKAAINYLTKLIAVHEARHNIRCNAVLPGMTATDAVQDNLTDDFRNFFLKHTPIQRMGLPEEIAAAVVYFASDDAAYTTGQILTVSGGFGLATPIFGDLSERSDARG

SEQ ID NO: 11507 - protein, 164 aa, Triticum aestivum; identical to SEQ ID NO: 6362

SEQ ID NO: 11508 - protein, 122 aa, Zea mays
MASREHHQPQEEEEEDTAGVVKLISAEGFEFVVDKKAAMVSNTLRNMLTSPGGFSETRQGEVRFPEIPTNILEKICQYFYWSLHYSSSWFNTLDGLLKSYLVQNFDVMESDKANKTVTCNVI

SEQ ID NO: 11509 - protein, 139 aa, Zinnia elegans
WFQNRRTRWKTKQLERDYNVLKTQVDSIKADNDKLMNHNNKLHAQLMALKGEGSNSIRAMVNLNKETEGSWSNGSDNSREDNNAIFYTPISNNLPNSSAMIGGSAPSYNEGFCNLLNVIDDQPAFWSWPEAEQQNQHLP

SEQ ID NO: 11510 - protein, 261 aa, Triticum aestivum
GRDVSSHGEGLPHVSEDYLKAVDKAKRKLRGLIAEKNCAPLMLRLAWHSAGTFDVATKTGGPFGTMKNPAEQAHGANAGLEIAVRLLEPIKEQFPILSYADFYQLAGVVAVEVTGGPEVPFHPGRQDKPEPPPEGRLPDATQGSDHLRQVFSTQMGLSDQDIVALSGGHTLGRCHKERSGFEGAWTANPLIFDNSYFTELLCGEKEGLLQLPTDKTLLTDPAFRPLVDKYAADEDAFFADYAEAHLKLSELGFGEAVEGCC

SEQ ID NO: 11511 - protein, 484 aa, Oceanobacillus iheyensis HTE831
MEKRTTLKKTLKPHWVWAIALGSSIGWGAFVQPAAWMGTAGPLGAMIGFGIGGLLMMLIAVSYGFLIKSFPVSGGEFAYAFISLGRTHAFISGWFLTLGYICIVALNASALALMFKFVFPSVLENFYMYQIADWDVYGMEIIIASIALIIFGYLNIRGGGFTGSAQFIFCIIMVGGVLLLTTLVGINPSADISNVAPLFPSDKTAIAAILSIVAIAPWAFVGFDNIPQAAEEFNFSSKKAFRLIILAILFATILYCLMIFATAMAQPWEGLVAAGHNWGTAEALQDILGTVGVAILAIALLMGIFTGLNGFIISTSRLLFAMSRAKFIPRSFSKLGKNETPYISIIFTVIVAMVAPWFGRQALTWVVDMSSVGVTIAYFYTCYTAFSLFKWNDNHGFNTNKHVVAPGKKIFALLGMVASISFLGLLLIPGSPAFLGLESRIALVVWIVLGIIFYIMKYKDYKNLDKEEMNYLILGSKEIKVKKD

SEQ ID NO: 11512 - protein, 224 aa, Triticum aestivum
MGLAMGKLMLGKIIVETPKHEVLHTGDGYEIRKYPPCGAAEVTYDPKEMKGDRDGGFQVLANYIGAFGKPQNTKPEAIAMTAPVITSSGGGEAEPIAMTAPVITSSEPEPVAMTVPVLTAEGREEQAGKVTMQFLLPSKYAKAEEAPRPTDERVVLREVGERKYAVVTFSGLAGDKVVAEKAEGLKAALQKDGHAVTGPFVLSRYNPAWTLPPLRTNEVMFPVE

SEQ ID NO: 11513 - protein, 295 aa, Rhizobium sp. USDA 3876
RGKTQIKEFAEFPDLEQLPLWGFDGSSTQQAEGHSSDCVLKPVAVYPDPARTNGVLVMCEVMMPDGVTPHASNKRATILDDEGAWFGFEQEYFFYKDGRPLGFPESGYPAPQGPYYTGVGYSNVGSVARQIVEEHLDLCLAAGINHEGINAEVAKGQWEFQIFGKGSKKAADQMWMARYLMQRLTEKYGIDIEYHCKPLGDTDWNGSGMHANFSTAYMREVGGKAYFEALMAAFDKNLMDHIAVYGPDNDKRLTGKHETAPWNRFSYGIADRGASIRVPHSFIKSDYKGYLEDRL

SEQ ID NO: 11514 - protein, 394 aa, Zea mays subsp. mays
LGAERRARLPPGEMGWPLVGGMWAFLRAFKSGKPDAFIASFVRRFGRTGVYRSFMFSSPTVLVTTAEGCKQVLMDDDAFVTGWPKATVALVGPRSFVAMPHDEHRRIRKLTAAPINGFDALTGYLPFIDSTVTSSLRAWADHGGSVEFLTELRRMTFKIIVQIFLGGADQATTRALERSYTELNYGMRAMAINLPGFAYRGALRARRRLVAVLQGVLDERRAARAKGVSGGGVDMMDRLIEAQDERGRHLDDDEIIDVLVMYLNAGHESSGHITMWATVFLQENPDMFARAKAEQEAIMRSIPSSQRGLTLRDFRKMEYLSQVIDETLRLVNISFVSFRQATRDVFVNGYLIPKGWKVQLWYRSVHMDPQVYPDPTKFDPLRWEGHSPRAGTFL

SEQ ID NO: 11515 - protein, 189 aa, Rhodospirillum rubrum
MSASEPPAVPLGTPAAAGPIILPHRGIWPRIASDAFIAPGAVVIGDVEIGARTSVWFGCVLRGDVHHIRIGARTNIQDGTIVHVTGGHLGTLIGDDITIGHRALLHACTLESNCFVGMGAIVMDGAVVESWAMVAAGALVTPGKRVESRSLWAGSPAARKRDLSAEDIAFFPESARKYADLADIYVEEM

SEQ ID NO: 11516 - protein, 368 aa, Pseudomonas putida
MEMEIKAAIVRQKNGPFLLEHVALNEPAEDQVLVRLVATGLCHTDLVCRDQHYPVPLPMVFGHEGAGVVERVGSAVKKVQPGDHVVLTFYTCGSCDACLSGDPTSCANSFGPNFMGRSVTGECTIHDHQGAEVGASFFGQSSFATYALSYERNTVKVTKDVPLELLGPLGCGIQTGAGSVLNALNPPAGSAIAIFGAGAVGLSAVMAAVVAGCTTIIAVDVKENRLELASELGATHIINPAANDPIEAIKEIFADGVPYVLETSGLPAVLTQAILSSAIGGEIGIVGAPPMGATVPVDINFLLFNRKLRGIVEGQSISDIFIPRLVELYRQGKFPFDKLIKFYPFDEINRAAEDSEKGVTLKPVLRIG

SEQ ID NO: 11517 - protein, 364 aa, Triticum aestivum
  unsure (1)..(364): unsure at all Xaa locations
MTVDRKDAEAAAAAATPFEIPALQPGRTCGAEESTRSHVLVKPIXKKRPRRSRDGPNSVSETIRRWKEVNQQLEHDPQGAKRARKPPAKGSKKGCMQGKGGPENTQCGFRGVRQRTWGKWVAEIREPNRVSRLWLGTFPTAEDAARAYDEAARAMYGALARTNFPVHPAQAPAVALPAAIEGVVRGASASCESTTTSANHSDVASNLPRQAQALEIYSQPDVLESTESVVLESVEHYSHQDTVPDAGSSIARSTSEEDVFEPLEPISSLPDGEADGFDIEELLRLMEADPIEVEPVTGGSWNGGANTGVEMGLQEPLYLDGLDQGMLEGMLQSDYPYPMWISEDRAMHNPAFHDAEMSEFFEGL

SEQ ID NO: 11518 - protein, 151 aa, Saccharomyces cerevisiae
MSDWDTNTIIGSRARAGGSGPRANVARSQGQINAARRQGLVVSVDKKYGSTNTRGDNEGQRLTKVDRETDIVKPKKLDPNVGRAISRARTDKKMSQKDLATKINEKPTVVNDYEAARAIPNQQVLSKLERALGVKLRGNNIGSPLGAPKKK

SEQ ID NO: 11519 - protein, 368 aa, Helicobacter pylori J99
MVVLGSTGSIGKNALKIAKKFGVKIEALSCGKNIALINEQIKVFKPKKVAILDPNDLNNLEPLGAEVFVGLDGIDAMIEECVSNLVINAIVGVAGLKASFKSLQRNKKLALANKESLVSAGHLLDISQITPVDSEHFGLWALLQNKTLKPKSLIISASGGAFRDTPLDLIAIQNAQNALKHPNWSMGDKITIDSASMVNKLFEILETYWLFGASLKIDALIERSSIVHALVEFEDNSVIAHLASADMQLPISYAINPKLASLSASIKPLDLYALSAIKFEPISVERYTLWRYKDLLLENPKLGVVLNASNEVAMKKFLNQEIAFGGFIQIISQALELYAKKSFKLSSLDEVLALDKEVRERFGSVARV

SEQ ID NO: 11520 - protein, 382 aa, Zea mays
MENQGPKPIRCKAAVCRAAGEPLAIEEVVVDTPKAHEVRIRIICTSLCHSDVTFWRMKDLPDNIPRIFGHEAFGVVESVGEQVDEFAAGDAVVPTFLGQCSECVDCRSARSNMCSKYRFAVRPGMPRDGTTRFTDGQGRPLHHFFGVSSFAEYTVVDVNQVVKLNPAVPPALACLLSCGASTGVGAAWKQAKVEPGSSVAIFGLGAVGLAVAEGARICGASKIIGVDINPDKCELGKKFGVTHFINPKELGEEKPVHQAIAEMTDGGADYCFECIGLAALMNDAFRSSRDGWGKTIILGVEMHGAPLCISPHEILHGKSVIGSMFGGVKPKQDIPILADKYMNKELELDKFITHEVGLKDINQAFDLLLQGKSLRCTIWMDK

SEQ ID NO: 11521 - protein, 260 aa, Zea mays
  unsure (1)..(260): unsure at all Xaa locations
MGPSRPAGDNSQTRRGQPCWFRVPQVGLIAVNDGIILRNHISRILQRHFKGKPYYVDIIDLFNEVEFKTASGQMLDLITTHEGEKDLTKYNLTVHRRIVQYKTAYYSFYLPVACALLLAGENLENFVDVKNILVEMGTYFQVQDDYLDXCFGDPELIGKIGTDIEDYKCSWXLLCKPLERAAENQKSILFENYGKSDPSXCLQRVKDLYKELNRPXVEGVFHEYERESYNKLIADIEAQPSKAVQTVLKSFLHKIYKRDK

SEQ ID NO: 11522 - protein, 291 aa, Saccharomyces cerevisiae
LVHVASVEKGRSYEDFQKVYNAIALKLREDDEYDNYIGYGPVLVALAWHISGTWDKHDNTGGSYGGTYRFKKEFNDPSNAGLQNGFKFLEPIHKEFPWISSGDLFSLGGVTAVQEMQGPKIPWRCGRVDTPEDTTPDNGRLPDADKDAGYVRTFFQRLNMNDREVVALMGAHALGKTHLKNSGYEGPWGAANNVFTNEFYLNLLNEDWKLEKNDANNEQWDSKSGYMMLPTDYSLIQDPKYLSIVKEYANDQDKFFKDFSKAFEKLLENGITFPKDAPSPFIFKTLEEQGL

SEQ ID NO: 11523 - protein, 119 aa, Triticum aestivum
TPSKAKYRRETDSEQVPRGKDEKDFEKRVKECLKLPGGKRMGHNEMTVPLTSAAIREVDVVGIFRYKDTWPLCLEFLRSGKIDVKPLITHRFGFSQGEVEEAFEVSARGRDAIKVMFNL

SEQ ID NO: 11524 - protein, 313 aa, Triticum aestivum
  unsure (1)..(313): unsure at all Xaa locations
MGSLGPHGEPTLTRSRHSPPVLSRVPTXALPTFWSRCATLFPPWTPPSRIRLMSFLSVLTSSLPTGTDSPHTGSAPRPWCSPSHAVVLSLYRSVDDQNGTHARRTCSSSHLRELFDLGCDALACAFEALALGSTLMCGRLTFCYWVVAAVPFYLATWEHYFTNTLILPVINGPTEGLMLIYVSHLFTFFTGAEWWAQDFRKSLPLISLVPLPFVPEIPLYVIVLILMIMFAVIPTVGSNIGNVQKVVDARKGSMELALAMLLPFIALLAGVAVWCYLSPSDIMKNQPHLLVIGTGSAFGYLVGKMILAHLCDE

SEQ ID NO: 11525 - protein, 364 aa, Glycine max
MATSENNNARPQRVAKKRAAAAICELHRNAAKRKRVVLGDLTNVSSNYVAVTEKEIQKQKKVKREQPARPVSTPEKVEERHDPQLCGPYVSDIYEYLRGMEVDPSKRPLMDYVQKIQRDVNANMRGVLVDWLVEVAEEYKLVSDTLYFSVAYIDRFLSLNILSRQRLQLLGVASMLIASKYEEIKPPEVEDFCYITDNTYSKEEVVNMEAEILKALKFELGGPTVKTFLRRFSRVGQEGVDTSDLQFEFLSCYLAELSLLDYNCIKFLPSLVAASVVFLARFMFSTKTHPWNSALHQLTRYKPADLKECVLNLHDLYLSRRGASLQAVREKYKQHKFKCVATTPSPPEIPLSFFEFEGQILRQL

SEQ ID NO: 11526 - protein, 471 aa, Bacillus anthracis str. A2012
MSKLLKKKSVTQLLEHNQSKALTKTLGAFDLIMLGVGSIIGTGVLVLTGLVAARDAGPAVIFSFVLAAIICGFIALCYAEIASTLPASGSVYTYSYATIGEFVAHLVGWSLLLIYIVATAAVAAGWTGYFHNLIKGFGLEIPKALVTIPSHGGIVNLPAVIITLILAWMLSRGTRESKRINNIMVLIKIGMILLFITVGIFYVKPMNWIPIAPYGLSGVFTGGAAILFAFTGFDILATSAEEVKDPKRNLPIGIIASLIICTIIYVMVCLVMTGMVSYKELNVPEAMAYVMEVVGQGKVAGAIAVGAVIGLMAVIFSNMYAATRVFFAMSRDGLLPKSFAKVNKKTGAPTFITGLAGIGSSIIAGFIDLKELVNLVNIGSLVTFALVCLSVIILRKSHPNLKRGFMVPFVPVLPCVAIVCCVFLMLNLPLRTWVYFSIWITIGVVIYFLYSIKHSNLNEETISKLHDKIAR

SEQ ID NO: 11527 - protein, 563 aa, Oryza sativa
MGVVEAEALHGAVEALAGSLQPHVATAFFVFSACTVALAALLAVVRLRPPWWCDCTVCEAFLTASWAGEFDNLCDWYAHLLRTSPAQTVHVHVLRNVLTANPVTVDHVLRARFDNYPKGAPFSAILADFLGRGIFNVDGDAWLFQRKLAAAELASPALRAFAARVVASELRCRLIPLLHSASREGNGKVLDLQDMFRRFAFDSICKISFGLDPGCLELSMPVSTLVEAFDTASTLSARRATVPMQIIWRLKRFLNVGDERKLRDAVRLVDALAAEVIRQRRKLGGAATGSDLLSRFMGSIDDDKYLRDIVVSFMLAGRDTIASALTAFFLLLSDHPEVATAIRDEVARVTGDGNRTMAATFDKLKDMHYVHAAMYESMRLFPPVQFDSKFAAGDDTLPDGTVVAKGTRVTYHAYAMGRMESVWGPDCAEFRPERWLRDGRFVPESPYRYPVFQAGVRVCIGKELALMEMKAVIVAVVRSFDIEAIARSSRRPKFAPGLTATFAGGLPVTCQRRRARARWCSPPTSPTPRRRTTRAQRWSRFSSRRCPGRRRSSAPAGRVSRSE

SEQ ID NO: 11528 - protein, 400 aa, Nicotiana tabacum
MKDFFLSLACAERLEDLDKAAAAVARLGHKCNDFGLNRFDLVYTDLKLGIIDFGKLEYGSKEIEKRVDKMEKLINATSGLYAALENLTELEISERKMKKWKEKKTAGQLQKVNCDMFNQRLEQQRKQVRQLREISLWSQTFDKSVGHMARIVCIIYARICVIFGPYIPVLPSVSLRNMRSSQQKEILKVQPENCLIEPIREQIISRSGPIPTTSKPTLVRFYSRKSIFFLCEDEGFGSEKLAKNNRVFHAAGPSTVGGSGLALRYANVITLVEKYSNPSESVDLNSRENLYQMLPENLKKTVRSKLSKNLKCMDEDESLAEGWREALKHIMEWLAPMAHNTINWQLERNLEKTKFDIKPSVLLLQTLHYSDKEKTDAAIADILVGLSCIYKCENRQWSES

SEQ ID NO: 11529 - protein, 436 aa, Mycobacterium tuberculosis H37Rv
MATGGRVVIRRRGDNEVVAHNDEVTNSTDGRADGRLRVVVLGSTGSIGTQALQVIADNPDRFEVVGLAAGGAHLDTLLRQRAQTGVTNIAVADEHAAQRVGDIPYHGSDAATRLVEQTEADVVLNALVGALGLRPTLAALKTGARLALANKESLVAGGSLVLRAARPGQIVPVDSEHSALAQCLRGGTPDEVAKLVLTASGGPFRGWSAADLEHVTPEQAGAHPTWSMGPMNTLNSASLVNKGLEVIETHLLFGIPYDRIDVVVHPQSIIHSMVTFIDGSTIAQASPPDMKLPISLALGWPRRVSGAAAACDFHTASSWEFEPLDTDVFPAVELARQAGVAGGCMTAVYNAANEEAAAAFLAGRIGFPAIVGIIADVLHAADQWAVEPATVDDVLDAQRWARERAQRAVSGMASVAIASTAKPGAAGRHASTLERS

SEQ ID NO: 11530 - protein, 392 aa, Lithachne pauciflora
EPARTEDPALSIAGAVHSQKLAVRAISRLQALPGGDVKLLCDTVVEHVRELTGYDRVMVYRFHEDEHGEVVAESRRADLEPYLGLHYPATDIPQASRFLFRQNRVRMIADCHAAPVRVIQDPALQQPLCLVGSTLRAPHGCHAQYMANMGSIASLVMAVIISSGGDDEHNITRGGIPSAMKLWGLVVCHHTSPRCIPFPLRYACEFLMQAFGLQLSMELQLAHQLSEKHILRTQTLLCDMLLRDSPTGIVTQSPSIMDLVKCDGAALYYHGKYYPLGVTPTEAQIKDIIEWLTLCHGDSTGLSTDNFADAGYPGAAALGDAVCGMAVAYITPSDYLFWFRSHTAKEIKWGGAKHHPEDKDDGQRMHPRSSFKAFLEVVKSRSLPWENAEMDA

SEQ ID NO: 11531 - protein, 163 aa, Hordeum vulgare subsp. vulgare
GSCWAFSAVSTVESINQLVTGEMITLSEQELVECSTNGQNSGCNGGLMDDAFDFIIKNGGIDTEEDYPYKAVDGKCDINRENAKVVSIDGFEDVPQNDEKSLQKAVAHQPVSVAIEAGGREFQLYHSGVFSGRCGTSLDHGVVAVGYGTDNGKDYWIVRNSWG

SEQ ID NO: 11532 - protein, 437 aa, Triticum aestivum
  unsure (1)..(437): unsure at all Xaa locations
MDPSKLGELRSFVEACKKDPALLADPALAFFRDYLASLGATLPAAAAAAQARARPQGEVXDDIDDDDEDEEEEGEDDQDMRDPTPEPDELDEDIVESDLELDNDGVVHPDHDDAPQKMGDSSVDVTEQSRXATQEAKGEAMAPKPEGELEESVVHLSKAILLSPTWAMMYGTSATVFIKMKKPAAPRRYGRPLLEVEYVMPEFLFTCWIVSSVREPGGGAALYRYAASILDXDDEFHAVLIRVEPNAHKIVEHRRKYDRLRKERAEKKAERDRLRRRAEAQAAYEKAKRKEQSSSRSSGGMPGGMPGGFPFPGGMGGMPGGFPGGMGGGFPGGMGGGMPAGMGGGMPAGMGGGMPAGMGGGMPGMGGGMPGAGGAPGNVDMGDILNDPDLMAAFGDPEVMAALQDVMSNPANLAKHQANPKVGPIIAKMMAKMNGNR

SEQ ID NO: 11533 - protein, 106 aa, Zea mays
MAKNPKDAAPEEEMPAAAEEQAAPAATVKVLFFARARDLTGVADSAVEVPPGSTAGECLARVLARFPKLEEIRGSVVLALNEEYAADSAAVADGDELAVIPPISGG

SEQ ID NO: 11534 - protein, 351 aa, Staphylococcus aureus subsp. aureus MW2
MKALVKTREGHGNLELLDKEVATPLDDKVKIKVHYAGICGTDIHTYEGHYKVNFPVTLGHEFSGEIVEVGADVKDFKVGDRVTSETTFYVCNECEYCKSKDYNLCNHRKGIGTQVDGAFTNYVIAREESLHHIPDEVSYQSAAMTEPLACAHHGVSKIQVNSGDVAVVMGPGPIGLLVAQVLKSKGATVVVTGLDNDKVRLDKAEALHMDYVVNLQQTDLKTYINGITDGYGADVVVECSGAVPAARQGLDILRKKGFYSQIGIFKDAEIPFDMEKVIQKEITVVGSRSQKPADWEPSLQLMADGLVNAEALVTKIYDISKWDEAYQHLKSGEGIKALLKPLDLDENEGEN

SEQ ID NO: 11535 - protein, 199 aa, Triticum aestivum
RELAAGGRTGNMLYDWFIGRELNPRINLPIFGEVDIKAWCELRPGMLGWIILDLAFIMQQYRNFGRVTDSIIIVTVAHTVYTFDALYMEPAILTTIDLIADGFGMMLSFGDLVWVPFTYSIQTRYLSIYPVDLGPMGVVGVLAVQGIGYYIFRSVNNEKNRFRTNPEDPRVKHLKYIETAAGSRLLVSGWWGMARHINY

SEQ ID NO: 11536 - protein, 366 aa, Pseudomonas aeruginosa PAO1
MSKMMKAAVFIQPGRIELVDKPIPDVGPNDALVRITTTTLCGTDVHILKGEYPVAPGLTVGHEPVGIIEKLGSAVVGYREGQRVIAGAICPNFNSYAAQDGVPSQDGSYLVESGRCACHGYKATAGWRFGNLIDGTQAEYVLVPDAQANLAPIPDGLSDEQVLMCPDIMSTGFKGAENANIRIGDSVAIFAQGPIGLCATAGARLLGASTIIAIDGNAHRLDIARGMGADVTLNFRECDVIEEILKLTGGRGVDASIEALGTQSTFETALRVLKPGGTLSSLGVYSEDLTIPLSAFAAGLGDHRINTALCPGGKERMRRLLNIVASGRVNLGPLVSHEYRLDDIVAAYDLFANQRDNVLKVAIKPH

SEQ ID NO: 11537 - protein, 454 aa, Pseudomonas fluorescens PfO-1
MTSNNPQTREWQALSSDHHLAPFSDFKQLKEKGPRIITNAKGVYLWDSEGNKILDGMAGLWCVAIGYGRDELADAAAKQMRELPYYNLFFQTAHPPALELAKAIADVAPEGMNHVFFTGSGSEGNDTMLRMVRHYWAIKGQPNKKVIISRKNGYHGSTVAGASLGGMTYMHEQGDLPIPGIVHIAQPYWFAEGGDMTPEEFGIWAANQLEEKILEVGVDNVGAFIAEPIQGAGGVIIPPDTYWPRIKEILAKYDILFVADEVICGFGRTGQWFGSDFYDLKPHMMTIAKGLTSGYIPMGGLIVRDEVVAVLNEGGDFNHGFTYSGHPVAAAVGLENIRILREEKIIERAHEETAPYLQKRLRELNDHPLVGEVRGVGLLGAIELVQDKATRKRYEGKGVGMICRQFCFDNGLIMRAVGDTMIIAPPLVISKAEIDELVTKARKCLDLTLSALQG

SEQ ID NO: 11538 - protein, 382 aa, Oryza sativa
  unsure (1)..(382): unsure at all Xaa locations
MSSSECRLIDHIIMLVDTVGNGGMMRGSGGRGKGVTSPPSLSSPPLPSWAVLCDLTAVSDSISPSPRLRLPVSERVRPPPELISILRAAAPAPASASPCSFRRLLALAGPSLGNAQLNSMAQVTATANARVLGFPAASRHGGPVGSRAGPAFLNLRAPALRHDSKKHPLRVGAASSLFTKYDPIKGIKPLLSIDKLRPRTQVGLSSIFIMSSSFSFPELETKPXRWWWRTLACVPYLLPLHNMWSFADAVYQLHPYLQQFGLFYAFIDTMALVPGWLFLMIFMTVYFFVVRRKWLPHFLRDHVNIGVILLDTGSQALATMCNWNPSIVYQGKPMVFFWMTXIAFIQISTVLECMRCALAGMYPSVPFVSQTAFIHSDMSMFR

SEQ ID NO: 11539 - protein, 145 aa, Triticum aestivum
MERPGHGGIGSGGGSKNPPPSGKDEYGGGYDRLDEEVEFRLPRGHRPVENLDTEGLEQASVDTRLASSNVGFRLLQKMGWKSGKGLGKNEQGILEPIKAGIRDAKLGVGKQEEDDFFTAEDNVQRKRLNVELEETEEHIKKREVT

SEQ ID NO: 11540 - protein, 329 aa, Yersinia pestis KIM
MVYQASSSRYQEMEYHRCGHSGLKLPAISLGLWHNFGDSTRYENSRSLIHRAFDHGITHFDLANNYGPPPGSAELNFGRILQQELRPYRDELIIASKAGYTMWPGPYGDWGSKKYLVASINQSLQRMGLDYVDIFYHHRPDPNTPLEETMAALDLLVRQGKALYIGLSNYPADQAQLACEILRALGTPCLIHQPKYSMFERGIEAGLQDTLDEYGVGSIAFSPLAGGLLTDRYLAGIPEDSRAASDSKFLSPEQLTPEKLVKIRQLNELALDRGQKLSQMSLAWVLRGGRVTSALIGASKVSQIDDAIGMLANTNFSDKEINAIEHILA

SEQ ID NO: 11541 - protein, 97 aa, Zea mays
RYLSPDLSGILIAVKTTGGTGGGKVFSRLLATIHGVAHLVVALGIELATDQVLKQAFVDVSIKFSSALCGMFWVFSVLTVLHTLVTALMNAFMDFIE

SEQ ID NO: 11542 - protein, 602 aa, Kluyveromyces lactis
MSHDPNQQQPHGGSGQGHHQRQLTNHAQGQHIGKYQIIKTLGEGSFGKVKLAYHISTGQKVALKIINKKVLAKSDMQGRIEREISYLRLLRHPHIIKLYDVIKSKDEIIMVIEYAGNELFDYIVQRDKMPEQEARRFFQQIISAVDYCHRHKIVHRDLKPENLLLDEHLNVKIADFGLSNIMTDGNFLKTSCGSPNYAAPEVISGKLYAGPEVDVWSSGVILYVMLCRRLPFDDESIPVLFKNISNGVYTIPNFLSQGAASLIKKMLIVNPVNRITVHEIMQDEWFKVDLPDYLVPAESTHQENSESKTEDGGPSVPLELIDDSLVQTLSNTMGYDVDEIYEALESDEDHPSLNEIRDAYQLIKENRNLINDIKVNKQQSNDLDTFLSQSPPTFEQSLHAPPGSKNRHSHRHSKRTQQRTYQYHYGNGSQDGDSTIAILPSSLPQIHRANMVAQGSQAAAKISPLSVKKSKTRWHFGIRSRSYPLDVMGEIYIALKNLGAEWAKPSEEDLWTIRVRWRYNIDMPDDEMKNKQIPDLMKMVIQLFQIETNNYLVDFKFDGWESSNGVVYSSRNDDEMSTFSAYPFLHLATRLIMELAVNSQGS

SEQ ID NO: 11543 - protein, 336 aa, Streptomyces rishiriensis
MRLLVTGGAGFIGSEFVRATLRGVLPGSSGTQITVLDKLTYSGNELNLAPIADLETYRFVQGDICDRGLVDDVVAGHDAIVHFAAETHVDRSIEGAASFVRTNALGTQVLLEAASRHRLGRFVHISTDEVYGSISEGAWTEASPVAPNAPYAAAKAAGDLLALAWHRTRKLDVVVTRCTNNYGPYQYPEKLIPLFTTNLLDGQQVPVYGDGHNRRQWLHVSDHCRAIQCVLLGGRPGEVYHIGGGTELTNLELTEHILEACGAGWDRVRHVPDRLGHDLRYSLDTTKIRTELGYSPRVAFADGLAETVEWYRTHRGWWEPLKNPDKATGSPTDAGR

SEQ ID NO: 11544 - protein, 344 aa, Ralstonia solanacearum
MDALVIHAANDLRIEDIDTPEVQPDQLRVQVRFGGICGSDLHYYNHGGFGTVRVKEPMVLGHEVAGRVEEIGPGVHRHAKGDRVAISPSRPCGQCHYCQQGLQNHCLDMRYYGSAMRTPHVQGAFRREIVIDESQAHRLADTLSDQEGAMAEPLSVALHAVRRAGPLLGKRVLVTGCGPIGALIVVAARRAGAAEIIVTDMGAYPLKAAVAVGADVTINVAEQPDGLKPYTTDKGQIDVLFEASGNERALRGAIDALRPRGIIVQVGLGGEMTLPLNAIVAKELELRGAFRFHEEFAMAVELLNKGLVDVKPLISATVPYRNAAHAFALAGDRTQAMKVLLDFQ

SEQ ID NO: 11545 - protein, 358 aa, Hippocratea volubilis
QSQKLAVRAISQLQSLPGGDIKLLCDTAVESVRDLTGYDRVMVYKFHEDEHGEVVAESKRPDLEPYIGLHYPATDIPQTSRFLFKQNRVRIIVDCHASPVNVIQDDGLMQPLCLVGSTLRAPHGCHAQYMENMGSIASLAMAVVINGNDEDGIGGRNPTRLWGLVVCHHTSARCIPFPLRYACEFLMQAFGLQLNMELQLAAQLLEKHVLKTQTLLCDMLLRESPTGIVTQSPSTMDLVKCDGAALYYQANYYPLGVTPTEAQIKDIVEWLLVFHGDSTGLSTDSLADAGYPGATLLGDAVCGMAVAYITNRDFLFWFRSHTAKEIKWGGAKRHPEDKDDGLRMHPRSSFKAFLEVVK

SEQ ID NO: 11546 - protein, 392 aa, Mascagnia hippocrateoides
DLEPVNPADVPVTAAGALKSYKLAAKAISRLQSLPSGNISLLCDVLVKEVRDLTGYDRVMVYKFHEDEHGEVVSECRRSDLESYLGLHYPATDIPQASRFLFMKNKVRMICDCLAPPVKVIQDERLPQPLSLCGSTLRSPHGCHAQYMTNMGTIASLVMSVTINEDDDMMDGDQQQMTRKLWGLVVCHHASPRFVPFPLRYACEFLIQVFGVQINKEVELAAQVREKHILQIQTMLCDMLLRDAPVAIITQSPNVMDLVKCDGAALYFKNKIWLLGVTPTEEQIRDIAEWLLEYHSGNTGLSTDSLMEAGYPGASVLGDAVCGMAAVSITSRDFLFWFRSHTAKEVKWGGAKHDPHDKDDGRKMHPRSSFKAFLEVVKWRSMPWEDIEMDAI

SEQ ID NO: 11547 - protein, 144 aa, Gossypium gossypioides
LGTSTFSEYTVVHVGQVAKINPEAPLDKVCVLSCGMSTGFGATMNVAKPKKGGSVAVFRLGAVGLAAAEGARVCEASRIIGIDLNPNRFEEAKKFGCTEFVNPKDYNKPIQEVIAEMTGGGVDCSIECTGSTQAMVSAFECVHD

SEQ ID NO: 11548 - protein, 183 aa, Triticum aestivum
MAGVGRNMVAPLLVLNLIMYLIVIGFASWNLNHFINGLTNRPGVGGNGATFYFLARPRRPGVVGAASKLAGVHHVRTWRGDSLATSASSALVAWAITALAFGLACKEIHIGGYRGWRLRVLEAFVIVLMFTQLLDVLALHSGLFGNQFGGNHAGGYPAEHAYGAGGDPHNKGMGMGTGGVARV

SEQ ID NO: 11549 - protein, 248 aa, Zea mays
QPSRNVAGEARQRVRPILRGPLRPLRQRVPLHRPSRRRRLSLAGALEGVELRFHEKLVGGSTLDATGVPLPDETLDEAKGSDAVLLGAIGGYKWDTNEKHLKPETGLLQLRAGLGVFANLRPAVVLPQLVDASTLKREVAEGVDIMVVRELTGGIYFGKPRGFGTNDKGDDIGFNTEVYSATFYSQLHSETNCKIMSHKPWLTVLKIILKLTTYEHDKKNGKRTENWSRLYYCTNIFITALTYFSKCL

SEQ ID NO: 11550 - protein, 190 aa, Oryza sativa
  unsure (1)..(190): unsure at all Xaa locations
TSGSPGCRRGDVWXRPEAMSDEFRRLQDMRXXELMRSSNEARNAANREKNRYIDVVPFDTTRVRLKPTSQTSSNDYINASFIKVTEDNRVAKFISTQGPLAKTFDDFWEMVYEYQCPVIVMLTQXXDSLKCDEYLPLRKQREAYGKYNVKITNAKRDSHQLWLRDVMVQCNESSRVHSVRHIEYPDWSDX

SEQ ID NO: 11551 - protein, 100 aa, Thermoplasma volcanium
MFCPKCGSLMTPVNGRYVCPSCGYEVSKKKEDLKIVNKSNDKETIMIREEVSAEPLDSDAICPRCHHKGARYVLKQTRSADEPETKFYTCEECGYRWREY

SEQ ID NO: 11552 - protein, 385 aa, Bacillus cereus ATCC 14579
MVKYISILGSTGSIGTSALDVVSAHPEHFKIVGLTANYNIDLLEQQIKTFQPRIVSVATKDLADKLRTRISANTKITHGTDGFIAVATHPDSNLVLSSVVGVSGLLPTIEALKAKKDIAIANKETLVAAGHIVTELAKQNGCRLIPVDSEHSAIFQCLKGENNKEIEKLIVTASGGAFRDKTRDEMQTLQAKDALKHPNWLMGAKLTIDSATLMNKGFEVMEARWLFDIPYKKINVMIHKESIIHSLVEFIDGSVMAQLGAPDMRMPIQYAFHYPTRLPSSYEKLNLLEIGSLHFEKPDLEKFPCLQYAYECGKIGGTTPAVLNAANEIANALFLKNEIAFFDIEKTIYKTVEAHHNVKDPSLDAILEADQWARQYANELLIKKR

SEQ ID NO: 11553 - protein, 219 aa, Bacillus anthracis str. A2012
MVFIIITVVVYLLATKLYKKFTLPVLTVTAIMICLFLTFGISHHEYKENGGDILTGLLSPAIVALAIPLFKERKILMQNFLSMLIGVVAGIVVLTTMNVVIGGILNIDKELILTTLPQLATIPIAISLADQIGGIPSMTSSFVVVAGITGAMIGPTVLKFFRITSTIGKGVGMGCASHIIGVSRLMKEGEKEATIGSVTMIVTGILISIFIPYGTKFIF

SEQ ID NO: 11554 - protein, 208 aa, Pirellula sp.
MARTNGCHTTSPTTKPQEFIMEKVLIVIGDATELLDTMYPYYRLQEAGFEPVVIAPEKRLYQLVLHEIKPGWTITKEWEGYTLDCDVPFSEVKEDDYAGIFFSGGRAPEYIRYDEDLVRITQHFFDTNKPIASVCHGVEIPAYADRVRGRRMATVAKCQFDLEVCGGIFVDEPCVIDGNLVSGRTYRDNGFYIAPWIQQLETARDSKS

SEQ ID NO: 11555 - protein, 468 aa, Triticum aestivum
  unsure (1)..(468): unsure at all Xaa locations
MALKPPSLPDQLSSRLEPPTTRSRSRRGAAAAFHQRRVHFAFQRRAKRPAYRLACCSRQQXAPPPAWPGRAVIAPERRSGAGPTPTSIVVSTGSAETQTLEIVAENTDKFRVVALAAGSNVTLLVDQVKRFKAIPVALRNDQLLSELKAGEAGFGEMPQLTGAEPVVRGVARYPEVVPAVAGIEAGKGIRPADTAIETGNDLALANKAPKIAGGTVVAPPAHKHKFKILPADSEHSAIFQCIQGLSEGITXVRVSLTASGGAFRDWPVEKLKDVKVADALKHPNWSMGKKITVDSATLFNKGLEVIEAHYLFGAEYDDIEIVIHPQSIIHSMIETQDSSVLAQLGWPDMRLPEPTYLGLAIWRLVLLGFKAPDSVKYASVDLAYAAGRAGGTMTGVLSAANEKAVELFIDEKISYLDIFKVVEMTCDAHRNELVTRPSLEEIIHYDQWARKFAANLEPSSSGRSPVLA

SEQ ID NO: 11556 - protein, 647 aa, Glycine max
  unsure (1)..(647): unsure at all Xaa locations
MVPKIMGCKESSNPPRTYSSPSKEQAHKQINITENHISNWDSVECSCRSEDLNSKFSFENESNVHQTRRIRKSQSLQSGLDQGIREGDEDLGLSCDGAKSQNESTISIRRYHNPNVEFQVCSGLPNDGSLFSIGDPMPSDKDAHEISDTPLSVEFAGDIPDQTFVPGSLFLRKSRSLPNIRASILSSERDAFKHAXQRSSDDLHALRMRQKEEFITEFHDQIRGDQERENEMEKPEDGHMDNFFDDGFDSYLLSGSAENWVMPITDDSSDVKTLQGDSSVHCVGEFPKKDFKIKRIEDWVVGLQHCGPPLEETNEDLSKVIEPLVDVNTVNGVTAASGDNKVTPGMEAAKRYISSLSANATAAQLGNHGLVVIPFLSAFVSLKVLNLAGNAVVRITAGALPRGLHALNLSRNKISTIEGLRELTRLRVLDLSYNRILRIGHGLASCSSLKELYLAGNKISEVEGLHRLLKLSILDLSFNKISTAKCLGQLAANYNTLQAINLDGNPAQKNVGDEHMKKYLQGLLPHLVYYNRQPMKVSSLKDGAERSVRLGMNSHQFDRGLRADRKTTRKGSQGVAATRRPSITSTHARRSVDSPKLSKGKQPLLPPTRTKVSTQSRYHFDAPDKALNLVSERSMRKSRSEGNFGVL

SEQ ID NO: 11557 - protein, 215 aa, Pinus pinaster
MQQALVAAMAAQTIIAASMASPLTLSNGHYPFQSEFKGSVVRIPQRAFSFAPAARALTVVAEAKKAVAVLKGNSQVEGVVNLSQEDNGPTTVKVRLTGLTPGKHGFHLHEFGDTTNGCMSTGSHFNPKKLTHGAPEDDVRHAGDLGNIVAGSDGVAEATIVDNQIPLSGPDSVIGRALVVHELEDDLGKGGHELSLTTGNAGGRLACGVVGLTPI

SEQ ID NO: 11558 - protein, 315 aa, Borrelia burgdorferi B31
MNNLKDKINTYSKLILGSWQFGGGYFKQVEKETAKKILKKAYDHGIRNIDTARAYGNGISEKIIGEIIEKDPTIRENILIASKCYPMEISEYRENFNESLKNLKTDYIDIYYIHWPKADFDLRPIASFLEEMRVKGRIKYVGVSNFEISHMESIKKVCKIDVNQIGYNPLFRNKEKDVIPYCEDNNIATISYSTIAQGLLSKANIKDKNKFNDIRTEKLILFKKEIWPYTLKTINKLEEIAKINNLTILELTYSWLKKTKLSGFIVGFSKENYVESNVNSFKAEINDKVYEEITSILDNFNHQTKNFPNLFNKKI

SEQ ID NO: 11559 - protein, 430 aa, Brassica rapa
ENSCTLSFLLVFFVMILFHPALSIYINTLSATESLTISSKRTLVSPGNVFELGFFKTTLSSRWYLGIWYKKVSERTYVWVANRDNPLSNSIGTLKISGNNLVLLGHSNKSVWSTNLTRGNERSPVVAELLANGNFVMRDSNNNDASGFLWQSFDYPTDTLLPEMKLGYDLKTGLNRFLISWRSSNDPSSGNFSYKLENRELPEFYLQQNDIRAHRSGPWNGIGFSAIPEDRKLSYMVYNFTENSEEVAYTFLMTNDSIYSRIQMSSEGDLRRLMWTPNSIAWNLFWSSPVDLKCDVYKACGPYSYCDLNTSPVCNCIQGFKPLNVQQWDLRDWSSGCIRRTPLSCSGDGFTRMRRMKLPETTKAIVDRSIGVKECEKRCLSDCNCTAYANVDIRNGGTGCAIWTGALEDIRTYFAEGQDLNVRLAPADLV

SEQ ID NO: 11560 - protein, 249 aa, Zea mays; identical to SEQ ID NO: 8411

SEQ ID NO: 11561 - protein, 282 aa, Perilla frutescens
GSWRSLPKLAGLLRCGKSCRLPWTNYLRPDIKRGPFSTEEEKLVIQLHGILGNRWAAIASQLPGRTDNEIKNLWNTHLKKRLLLMGIDPHTHEPSLTSNGLLTRPPSSPSTRHMAQWESPRLDAEARLSKESLLSIHAPLPKSEADHFLRLSNSEVGETFRKIKNGEKAEPPSPSQSPGSSASTKCCSFSGTTTEIGLQSGLHETDCKSSKTCTEYVRTGTDSSSSNEMEDSSESTLQLLLDFPCKNDMSFLGNADCYSLYPGFTNGSLYDSSSQEKKGGFV

SEQ ID NO: 11562 - protein, 334 aa, Streptomyces avermitilis MA-4680
MTTVALKPATMAQALTRALRDAMAADPAVHVMGEDVGTLGGVFRVTDGLAKEFGEDRCTDTPLAEAGILGTAVGMAMYGLRPVVEMQFDAFAYPAFEQLISHVARMRNRTRGAMPLPITIRVPYGGGIGGVEHHSDSSEAYYMATPGLHVVTPATVADAYGLLRAAIASDDPVVFLEPKRLYWSKDSWNPDEPGTVEPIGRAVVRRSGRSATLITYGPSLPVCLEAAEAARAEGWDLEVVDLRSLVPFDDETVCASVRRTGRAVVVHESGGYGGPGGEIAARITERCFHHLEAPVLRVAGFDIPYPPPMLERHHLPGVDRILDAVGRLQWEAGS

SEQ ID NO: 11563 - protein, 375 aa, Triticum aestivum
  unsure (1)..(375): unsure at all Xaa locations
IRDPSRNPNLNRLDFDQLCAKGGNMDSDSTVPLSERPEWSDVVPLTQDDGPNPVVRIAYKEDFRETMDYFRAIYRSDERSARALRLTEEALRLNSGNYTVTDPSSFALVLLFLKSWIXLDCNFLKVWHFRRLVLEELNNDLYEELKFIESIAEDNSKNYQLWHHRRWVAEKLGPDVAGKELEFTRRVLSLDAKHYHAWSHRQWALQALGGWENELNYCHELLEADVFNNSAWNQRYYVITRSPSLGGLEAMRESEVSYTVKAILANPGNESSWRYLKALYKDDTESWISDPSVSSVCLKVLSRTDCFHGFALSTLLDLLCDGLRPTNEHRDSVKALANEEPETNLANLVCTILCRVDPIRANYWAWRKSKITVAI

SEQ ID NO: 11564 - protein, 171 aa, Photobacterium leiognathi
MKISKILLCLSLLTSCQTFADQLDINIKDLKTGKSIGYVNVKENVYGLIFTPHLKDLKPGIHGFHIHQNGSCQAIEKNGNVILGGAAGGHYDPFNTHKHGFPWGRDNHRGDLPALYVNNDGIANMPVIAQRLTLDELKGHAIMIHQNGDNYSDSPKPLGGGGPREACGVIK

SEQ ID NO: 11565 - protein, 482 aa, Schizosaccharomyces pombe
MTTRRLTRQHLLANTLGNNDENHPSNHIARAKSSLHSSENSLVNGKKATVSSTNVPKKRHALDDVSNFHNKEGVPLASKNTNVRHTTASVSTRRALEEKSIIPATDDEPASKKRRQPSVFNSSVPSLPQHLSTKSHSVSTHGVDAFHKDQATIPKKLKKDVDERVVSKDIPKLHRDSVESPESQDWDDLDAEDWADPLMVSEYVVDIFEYLNELEIETMPSPTYMDRQKELAWKMRGILTDWLIEVHSRFRLLPETLFLAVNIIDRFLSLRVCSLNKLQLVGIAALFIASKYEEVMCPSVQNFVYMADGGYDEEEILQAERYILRVLEFNLAYPNPMNFLRRISKADFYDIQTRTVAKYLVEIGLLDHKLLPYPPSQQCAAAMYLAREMLGRGPWNRNLVHYSGYEEYQLISVVKKMINYLQKPVQHEAFFKKYASKKFMKASLFVRDWIKKNSIPLGDDADEDYTFHKQKRIQHDMKDEEW

SEQ ID NO: 11566 - protein, 373 aa, Neurospora crassa
MPPRINLPPVTRISLLALGLQSVLSAAIRYRQWTAHSEIVIPYLNLIPQLSLVYPWTFVTTTLVESNIFTFSIAALTLYHGGRYLERAWSSRELAKFLLVTSLIPNALCFATLIFFFTFTRNERWTLMTIAGTISLQISFLVAFSQLVPAHTVTLFRGILSLRVPRFPLLYIGVVTALCLTPMLTSVSFLLAVYGFITSWTYLRFYKAVFPDLDQSQTSSLRGDASETFAFAEFFPGPVRPVVAGISENVFNMLVAMRVCTPFTQDHISAARGDNAFSHHSHQRGVPGSARAEAERRRALALKALDQRLHAATAGAAARASSNPAPPAVQPPAPSATGPTVQTQPQANTQKTMTAQTGEAGASSDNDGSRSSA

SEQ ID NO: 11567 - protein, 228 aa, Zea mays
MKKIFGAKKNKDPPPTIQDATDRITKRGDTVDEKIKKLDAELARYKEQIKKTRPGPAQEAVKARAMRVLKQRRMYEGQRDMLYNQTYNLDQVAFAAEGLKDAQQTMTAMKAANKELKGMMKTVKLEDIDSMQDEMMDLMDVSTEIQETLGRSYNVPDDIDEEELMGELDALEADMDFESESVPSYLQPDQEPELSLPAAPTGHAAVPANQQQEDELGLPTVPQASIRT

SEQ ID NO: 11568 - protein, 344 aa, Pseudomonas putida KT2440
MPQSKLINRRVVLASRPHGAPLEANFRIEQSPIPEPAEGQVLLRTVYLSLDPYMRGRMSDAPSYAAPVEIGGVIVGGTVCRVEASKNPAYKVGDWVLSFAGWQDYTLSDGSDLTALGESPAHPSYALGIFGMPGFTAYMGLLDIGRPQAGETLVVAAATGPVGATVGQIGKIKGCHVVGVAGGAEKCRHAVEVLGFDACLDHRAPDFAEQLAKACPAGIDIYFENVGGKVFDAVLPLLNTKARVPVCGIIAHYNDTALPNGPDRLPALMGSILRKRIHVQGFIIFDDYGHRYNEFFNDMSSWFAQGRIKYREELVSGLEEAPKAFIGLLEGRNFGKLVVRVSED

SEQ ID NO: 11569 - protein, 281 aa, Nicotiana tabacum
MVRAPCCEKMGLKKGPWTPEEDQVLVSYIQTNGHGNWRALPKLAGLLRCGKSCRLRWTNYLRPDIKRGNFTREEEDSIIQLHEMLGNRWSAIAARLPGRTDNEIKNVWHTHLKKRLKNYQPPQNSKKHSKNNLDSKAPSTSQTFNNSDNFSNIQEDINGPVTGPNSPQRSSSEMSTVTADSTAMTTITIDDQNMFKQLDEMNSSESFIPEIDESFWTNDLSTGDNSNFDMEGTGEELQVQFPFSSVKQESMDMVGTKLEDDMDFWYNVFIKSGDLLDLPEF

SEQ ID NO: 11570 - protein, 216 aa, Shigella flexneri 2a str. 301
MLDLFADAEPWQEPLAAGAVILRRFAFNAAEQLIRDINDVASQSPFRQMVAPGGYTMSVAMTNCGHLGWTTHRQGYLYSPIDPQTNKPWPAMPQSFHDLCQRAATAAGYPDFQPDACLINRYAPGAKLSLHQDKDEPDLRAPIVSVSLGLPAIFQFGGLKRNDPLKRLLLEHGDVVVWGGESRLFYHGIQPLKAGFHPLTTDCRYNLTFRQAGKKE

SEQ ID NO: 11571 - protein, 391 aa, Nelumbo nucifera
DLEPVNPADVPVTAAGALKSYKLAAKSISRLQSLPSGNISLLCDVLVREVSDLTGYDRIMVYKFHEDEHGGVVAECRRPDLESYLGLHYPATDIPQASRFLFMKNKVRMICDCLAPPVKVIHDKKLAQPLSLCASTLRVPHGCHAQYMANMGSIASLVMSVTINDDDNEMESDQPKGRKLWGLVVCHHTSPRFVPFPLRYACEFLVQVFGIQLDKEVELAAQLREKHILKTQTLLCDMLLRNAPVGIFTESPNVMDLVKCDGASLYYKNKFWLLGITPTEAQIRDIAGWLLEHHDGSTGLSTDSLMEAGYPGASVLGDAVCGMAAIKITSKDFLFWFRSHTAKKIKWGGAKHDPVVKDGGRKVHPRSSFKAFLEVVKRRSLPWEDVEMDAI

SEQ ID NO: 11572 - protein, 329 aa, Oryza sativa
  unsure (1)..(329): unsure at all Xaa locations
XCDRAGRRACGRGCSSSSSSSRGRRGGRGAGRISRCRCPSRRSRCRCRCRCRRRRRRRRRRRPGRPRSAACPPRRIRSAPRRRPXPPLSELERVRRIGNGAGGTVWMVRHRPTGRPYALKAGELQILVEYMDGGSLEGRRIASEAFLADVARQVLSGIAYLHRRHIVHRDIKPSNLLIDSGRRVKIADFGVGRILNQTMDPCNSSVGTIAYMSPERINTDLNDGAYDGYAGDIWSFGLSILEFYMGRFPLGENLGKQGDWAALMCAICYSDSPAPPPNASPEFKSFISCCLQKNPARRPSAAQLLQHRFVAGPQQQQQPQPQPLAPPPS

SEQ ID NO: 11573 - protein, 263 aa, Oryza sativa; identical to SEQ ID NO: 9997

SEQ ID NO: 11574 - protein, 288 aa, Clostridium thermocellum ATCC 27405
AGAKLIVGDLRDKEFVKKVFLENDIEAVIHFAAYIEVGESVQNPLKYYNNNVIATLNLLTAMEEAKVDKIVFSSTAATYGEPENIPILETDRTLPTNPYGETKLAVEKALKWCDRAYGIKYIALRYFNASGAHESGEIGEDHSPESHLIPLVIQAALGKRESIKIFGNDYNTPDGTCIRDYIHVSDLANAHYLALQRLREGKESAVYNLGNGKGFSVKEVIDVVRKVTGRPIKVEDAPRRPGDPAVLVASSEKIKKELNWQPRMADLETIVSTAWKWHLSHPNGYNDK

SEQ ID NO: 11575 - protein, 256 aa, Brassica oleracea
MGRGRVQLKRIENKINRQVTFSKRRAGLMKKAHEISVLCDAEVALVVFSHKGKLFEYSTDSCMEKILERYERYSYAERQLIAPESDSNTNWSMEYNRLKAKIELLERNQRHYLGEDLQAMSPKELQNLEQQLDTALKHIRSRKNQLMYDSINELQRKEKAIQEQNSMLSKQIKERENVLRAQQEQWDEQNHGHNMPPPPPPQQHQIQHPYMLSHQPSPFLNMGGLYQEEDQMAMRRNDLDLSLEPVYNCNLGCFAA

SEQ ID NO: 11576 - protein, 380 aa, Acremonium chrysogenum
MTTTYKILVLPGDHIGPEIMAEAIKVLTTIETHRPNLHFNLTTDLVGGTSIDTHGVPITQSVLDAAKASDAVLFGSIGGPEWAGVHPTPESGLLQLRQHLDAFANLRPCEFLVPSLVGASPIREHVVKGTRFIVVRENCGGAYFGEKKEEEDVASDLWVYTRPEIERLARVSAAVARIMGRSEDDNQAATVWSADKANVLASGRLWRRITSDIFAKEFPDITLQHQLADSMAMLMVRDPRRFNGVIHTDNTFGDILSDISGAITGTLGLMPSASLCGVPGEGHRSNGIYEPVHGSAPDISGKGLANPVAQILSVAMMLRYSMGLEKEATAVERAVVKVLDAKSEGGLEIRTGDLGGRATCSQVGDAVCEVLGPLLQGKKA

SEQ ID NO: 11577 - protein, 297 aa, Arabidopsis thaliana
MAAKALKDLKNLPVSERNIDCKKNPCAGKMNGKAEDRPPQNSVPLDHNHPTGDEIEKPEAERVIVELEYIKSKDLNNVAEVDAVLKVSIVLSWYYTMLYCDFSFSLDRSSSFHFPQGRNAAFAKVILFVVKSLKNPRSAVSKTACMTSEDIFSSYNDHIFDQLDRLLTQLLLKSSQDKRFVCEAAERALVAMTTHVSPALLLPKLRPCLKNKSPRIRAKASACFSGCVPRLEAARTVFLELETVYKKTTPVEPEEENPEAATWPIFCQSNLSPLSAQAVLRVTNVTGEAREGLVTGS

SEQ ID NO: 11578 - protein, 246 aa, Agrobacterium tumefaciens str. C58 (Cereon); identical to SEQ ID NO: 445

SEQ ID NO: 11579 - protein, 139 aa, Tolypothrix sp. PCC 7601
IYRFDENWHGTVIAEDKSAHLSPYLSLRYPASDIPKQARQLYRDNWLRLIPDVDYQPVALLPHHNPVTNQPTDLSHSVLRSVSPLHIEYLHNMGVKASMSISLLKNQKLWGLIACHHESPKYVPYEIRSACEFLGQMTS

SEQ ID NO: 11580 - protein, 106 aa, Glycine max
MDMSNPAVFVNAQLIPNFIGKKVRAVVQVSQCDGGVATAKSTDDCQLTIKGLPQVPLMNYIEVIGIAESNSSIDAEIWTDFGSTFDTFSYNQLCQLANGEFKGLFL

SEQ ID NO: 11581 - protein, 75 aa, Zea mays
  unsure (1)..(75): unsure at all Xaa locations
MVKVRDDVNLPIYQGENINDKTFDEKSHVLDPYKMLXEYTQSTVMLNLLYAFSTGGYSNIQRVTQWKLDVTEHSK

SEQ ID NO: 11582 - protein, 253 aa, Arthrobacter ilicis
MASSVGNDFEGLAALVTGGASGIGAAIADRLAAGGAKVAVLDLAPETSPHFGVQCNVADDASVRTAVERVVQQFGRLDIVINNAGIGAQGDIAANDDDEWLRVLNVNVVGIARVSRAALPHLRESPAAAIVNTCSIAATAGLPQRALYSASKGAVLSLTLAMAADHVREGIRVNCVNPGTVDTPWVGRLLDSAADPAGERAALNARQPHGRMVVPAEVAGAVAYLASPLSGSTTGTSLAVDGGMQGLRLRPVQ

SEQ ID NO: 11583 - protein, 255 aa, Daucus carota subsp. sativus
MSFVDDQSGDLSLHERKSGRGKIEIKRIENTTNRQVTFCKRRNGLLKKAYELSVLCDAEVALIVFSNRGRLYEYANNSVRGTIERYKKANSDTPNTATVSEANTQYYQKEAARLRQQISNLQNSNRHLMGEALGAVPAKELKGLETKLQNGLSRVRSKKNELLFAEIEFMRKREIDLHNNNQYLRAKISENERAQQQMSLMPGASGSSEQYRDVGQPHESFDARNYLQVNGLQPNNANYSSHQDHQTQHVPLQLV

SEQ ID NO: 11584 - protein, 141 aa, Zea mays
  unsure (1)..(141): unsure at all Xaa locations
MASGSMKREISETHDTLRFGLNAGVKADLAPPHPLQSSIQSEAKFWADKKKFGTEAIYGSALNIRKXLDAQILSRFQRPPGALPSSLLGYEALTGSLDDFGFEDYLNMPQDSEGFRQPDMHHGMEVRLGLSXKGPICPSFS

SEQ ID NO: 11585 - protein, 287 aa, Salmonella enterica subsp. enterica serovar Typhi
MKSIVIEKPNTLTIETRALLQPASGEVRIKVKLAGICGSDSHIYRGHNPFAKYPRVIGHEFFGVIDAVGDNVNRDRIGERVSVDPVISCGHCYPCSVGKPNVCTSLVVLGVHRDGGFSEYAVAPARNAHRIPDNIADHHAVMVEPFTIAANVTGQVNPTEQDVALIYGAGPMGLTTVQALKGVYQVKTVIVVDRIEESPAARIVLMGFSSDPCEIVQQGITGKELAIYSSRLNANKFPVVIDWLNKGLIDPDKLITHTFDYQHVTDAIELFEKDQRQCCKVLLTFAK

SEQ ID NO: 11586 - protein, 395 aa, Campylobacter jejuni subsp. jejuni NCTC 11168
MKMDYKEQSHIIPTYKRFDIVLEKGQGVYLFDDKAKKYLDFSSGIGVCALGYNHAKFNAKIKAQVDKLLHTSNLYYNENIAAAAKNLAKASALERVFFTNSGTESIEGAMKTARKYAFNKGVKGGQFIAFKHSFHGRTLGALSLTANEKYQKPFKPLISGVKFAKYNDISSVEKLVNEKTCAIILESVQGEGGINPANKDFYKALRKLCDEKDILLIADEIQCGMGRSGKFFAYEHAQILPDIMTSAKALGCGLSVGAFVINQKVASNSLEAGDHGSTYGGNPLVCAGVNAVFEIFKEEKILENVNKLTPYLEQSLDELINEFDFCKKRKGLGFMQGLSLDKSVKVAKVIQKCQENALLLISCGENDLRFLPPLILQKEHIDEMSEKLRKALKSF

SEQ ID NO: 11587 - protein, 143 aa, Zea mays; identical to SEQ ID NO: 1467

SEQ ID NO: 11588 - protein, 309 aa, Oryza sativa (japonica cultivar-group); identical to SEQ ID NO: 10246

SEQ ID NO: 11589 - protein, 751 aa, Geobacillus stearothermophilus
MENQNRQNAAQCPFHGSVTNQSSNRTTNKDWWPNQLNLSILHQHDRKTNPHDEEFNYAEEFQKLDYWALKEDLRKLMTESQDWWPADYGHYGPLFIRMAWHSAGTYRIGDGRGGASTGTQRFAPLNSWPDNANLDKARRLLWPIKKKYGNKISWADLFILAGNVAIESMGGKTIGFGGGRVDVWHPEEDVYWGSEKEWLASERYSGDRELENPLAAVQMGLIYVNPEGPDGKPDPKAAARDIRETFRRMGMNDEETVALIAGGHTFGKAHGAGPATHVGPEPEAAPIEAQGLGWISSYGKGKGSDTITSGIEGAWTPTPTQWDTSYFDMLFGYDWWLTKSPAGAWQWMAVDPDEKDLAPDAEDPSKKVPTMMMTTDLALRFDPEYEKIARRFHQNPEEFAEAFARAWFKLTHRDMGPKTRYLGPEVPKEDFIWQDPIPEVDYELTEAEIEEIKAKILNSGLTVSELVKTAWASASTFRNSDKRGGANGARIRLAPQKDWEVNEPERLAKVLSVYEDIQRELPKKVSIADLIVLGGSAAVEKAARDAGFDVKVPFFPGRGDATQEQTDVESFAVLEPFADGFRNYQKQEYSVPPEELLVDKAQLLGLTAPEMTVLVGGLRVLGANYRDLPHGVFTDRIGVLTNDFFVNLLDMNYEWVPTDSGIYEIRDRKTGEVRWTATRVDLIFGSNSILRSYAEFYAQDDNQEKFVRDFINAWVKVMNADRFDLVKKARESVTALQCTTVSRSNEKAGLQ

SEQ ID NO: 11590 - protein, 477 aa, Xylella fastidiosa Temecula1
MFKQLWATKLSQPSQDSAEGLSMQRVLGVWGLTALGIGAVIGGGIFVITGQAAANHAGPAIMLSFALAAICCTFCALAYAEFAAMVPVSGSAYTYTYATFGELAAWFIGWMLVLEYGVSAAAVAVSWSGYFLSLLQHLGIHLPAALVNAPLDGTLHATGAIANLPAATIVLLLTWLCYFGIRKSSKINIAMVALKSGLILLIIGVGWKYVNPDYWQPFIPTNQGPGKYGWNGVLHGASMVFFAYIGFEAVSVAAQESHRPQRDLPISMMSALAICTVLYIMMAAVMTGLVPYTQLGTDEPVVTAVAAHPQLGWLRVVVEIGALVGLSSVVLVMLIGQPRIFMIMAGDGLLPPIFSTIHSKHRTPHINTVITGLGIALLAAVFPLDVLGELTSMGTLIAFTAVCAGVLILRCTRPDLPRPFRMPAAWLFCSAGVLSCITLLSAMTRHNWMLMSVWTVLGFSLYFSYGYRHSKLHQEST

SEQ ID NO: 11591 - protein, 522 aa, Candida tropicalis
MTAQDIIATYITKWYVIVPLALIAYRVLDYFYGRYLMYKLGAKPFFQKQTDGYFGFKAPLELLKKKSDGTLIDFTLERIQALNRPDIPTFTFPIFSINLISTLEPENIKAILATQFNDFSLGTRHSHFAPLLGDGIFTLDGAGWKHSRSMLRPQFAREQISHVKLLEPHMQVFFKHVRKAQGKTFDIQELFFRLTVDSATEFLFGESVESLRDESIGMSINALDFDGKAGFADAFNYSQNYLASRAVMQQLYWVLNGKKFKECNAKVHKFADYYVSKALDLTPEQLEKQDGYVFLYELVKQTRDRQVLRDQLLNIMVAGRDTTAGLLSFVFFELARNPEVTNKLREEIEDKFGLGENARVEDISFESLKSCEYLKAVLNETLRLYPSVPQNFRVATKNTTLPRGGGKDGLSPVLVRKGQTVMYGVYAAHRNPAVYGKDALEFRPERWFEPETKKLGWAFLPFNGGPRICLGQQFALTEASYVTVRLLQEFGHLSMDPNTEYPPRKMSHLTMSLFDGANIEMY

SEQ ID NO: 11592 - protein, 339 aa, Yersinia pestis CO92
MDYIKLGHCGLQVSRLCLGTMNMGSKQWKPWVFDKAESTPLIKHALDCGINFIDLADFYSAGVGEEVVGRIVKNLMSRDELVLTTKVGYPIGHGPNNQGHSRKHIMASIDASLKRLGTDYIDIYMLHYFDINTPVEETWSAMNDIIHSGKARYTGVSTMFTWQLSKILWCCERNGFAKPINMQLQLNCAYREEEREMIPQCRDQGLGISAFSPLARGLLSCDFSSVRNKTDFFTQEMYADVTSLNIAQSVERVAKNRGITPAQVAQAWVLNHPGTDCMLVGADTIEQINSAVTALRISLNAEEHFELERNYTPCDVINDYTAGQRIAREARPPSGIFAP

SEQ ID NO: 11593 - protein, 400 aa, Pseudomonas putida KT2440
MGCDVSRPQRITVLGATGSIGLSTLDVIARHPDRYQAFALTGYSRIDELLALCVRHRPAFAVVPSTEAAVRLRASLAAAGCTTEVLEGEAGLCQVASAAEVDAVMAAIVGAAGLRPTLAAVEAGKKVLLANKEALVMSGALFMEAVRQKGAVLLPIDSEHNAIFQCMPGDYARGLSAVGVRRILLTASGGPFRETPVEALLDVTPEQACAHPNWSMGRKISVDSASMMNKGLELIEACWLFDAVPSKVEVVVHPQSVIHSLVDYVDGSVLAQLGNPDMRTPIANALAWPERIDSGVAPLDLFAIARLDFQAPDEQRFPCLRLARQAAEAGNSAPAVLNAANEVAVQAFLERRIRFPEIAGMIEQVLDQEPVVPLPSLDAVFAADQRARELSREWLRRHGR

SEQ ID NO: 11594 - protein, 255 aa, Petunia integrifolia
MSTSNASTSGVRKGAWTEEEDLLLRECIEKYGEGKWHLVPVRAGLNRCRKSCRLRWLNYLRPHIKRGDFSLDEVDLILRLHKLLGNRWSLVAGRLPGRTANDVKNYWNTHLRKKLIAPHDQKQESKNKAMKITENNIIKPRPQTFSRPAMNHVSCWNGKSCSKNTIDKNEGDTEIIKFSDEKQKPEESIDDGLQWWANLLANNIEIEELVSCNSPTLLHEETAPSVNAESSLTQGGGSGLSDFSVDIDDIWDLVS

SEQ ID NO: 11595 - protein, 192 aa, Zea mays
MAEKKMLTLRSSDCEEFEVEEAVLMKSEIIRFMIEDDCADNVIPLANVNSKTLALVIEYCNKHVHADAAETTSASSAGGGGEVDLKKWDAEFVKVAPATLFDLIMAANYLDIKGLQGLTCRAVVDMIQGKSPEEIRKTFNIKNDLTKEEEEAIRSENSWAFDPLPVRSSGPRWLLLALISIASLLVCSYLLI

SEQ ID NO: 11596 - protein, 116 aa, Zea mays
  unsure (1)..(116): unsure at all Xaa locations
DRHRVLEFLSLACFYDMPRNNGSVGSDQIHPLYMDDLTNMTGMEYLLSEVMETHLFVIRKQKWDXPDKXRPMLAYYILDXSIYQAPQLXNVFDLHLRRDIHAILEAVTISCSKFEK

SEQ ID NO: 11597 - protein, 258 aa, Guillardia theta
MLRAKLSSNSLLKKIVDAVKDLISDANIEFTNSGLSLQAMDSSHVSLVSLIIPPEEFEVYQCEKIQSLGINLNWFYKILKCATNEDSVEIIYKNNENFITFLFRNEANERSSEFQLRLLEINNETLGIPETIYSAVVTLTAVEYKRVCSEMLTIGDTVYLSISENTIKFEIEGEVGKGSISLKSHILEENSVEDNNKTSDMEIIKMGFALRYLNTFAKAVPLSDKVTLKMSKDVPLQLEFNFGIKSLLRYYLAPKVDH

SEQ ID NO: 11598 - protein, 398 aa, Buchnera aphidicola str. Sg (Schizaphis graminum)
MKKITVLGSTGSIGISTLSIVKNNPSLFKVIVLVANKNSSMMLEQCEYFSPDWAIMKNKKSAHILKKRLKDKKIKTQVLSGNKAICQLAALKESDLVISAIVGMAGLLPTLSAINAGKTILLANKESLIVCGIIFMKALSSNKAKIFPIDSEHNAIFQVLPKFVQKNLGKVNLKKNGVKSIILTASGGPFYNFKRENLSFVTPLEACSHPNWSMGRKISIDSATMINKGFEYAEARLLFNASSSEIDILIHPQSIIHSMVEYIDGTILAQLSVPDMKVAISYAMSWPNRISSGAKFLNFNKLSNLSFFKPDFIQFPCLKLAIDAFSQGQAAMTVLNAVNEVTVSAFLDSKISFNKISEINTDILMSSSFSEPVSVEEVLEIDKKTRIKSQKKISSLIF

SEQ ID NO: 11599 - protein, 306 aa, Prochlorococcus marinus subsp. pastoris str. CCMP1378
MKILVMGGTRFVGKSLVSKLLNQNHDIDIFTRGNKTNPDNTNLIKGDRNDIECILKLKNKKYDVIFDISGREVEQTKLLIENLDDSFFRYIYVSSAGVYKDNYELPLSEDSPLDTNSRHKGKFETENWLVEKKIPFTSFRPTYIYGPGNYNKIENWFFERLFHLKSIPIPADGSLITQLGHVSDLSDVMIKCLDFEKSKNSIYNCSGERGVTIKGLIYLCAEVCGLNKTDIYLNKFDFEKLDPKSRKGFPIRLNHYQTDISKIKNDLNWKPKFDLLSGLKDSFIKDYQFKKDNKFDRTSDSVLFNA

SEQ ID NO: 11600 - protein, 347 aa, Sinorhizobium meliloti
MKAVRLESVGNISVRNVGIPEPGPDDLLVKVEACGICGTDRHLLHGEFPSTPPVTLGHEFCGIVVEAGSAVRDIAPGARITGDPNISCGRCPQCQAGRVNLCRNLRAIGIHRDGGFAEYVLVPRKQAFEIPLTLDPVHGAFCEPLACCLHGVDLSGIKAGSTVAILGGGVIGLLTVQLARLAGATTVILSTRQATKRRLAEEVGATATVDPSAGDVVEAIAGPVGLVPGGVDVVIECAGVAETVKQSTRLAKAGGTVVILGVLPQGEKVEIEPFDILFRELRVLGSFINPFVHRRAADLVATGAIEIDRMISRRISLDEAPDVISNPAAAGEVKVLVIPSAERVAQQ

SEQ ID NO: 11601 - protein, 454 aa, Pirellula sp.
MFRLSRSTSISDSATNTVERLESEVRGYCRLFPSVFQTAKGSTLMTAEGRQFIDFFCGAGSLNYGHNPPAVKQALLDYVSHDGIQHSLDMMTEAKAQFLDRFEQTILRPRSMDYKIQFTGPTGTNAVEAAIKLAKQHRKRSHVVAFTNAYHGHSLGSLSLTGNQSYHSEYYGSHNNVSFLPYDGYLGDFDTTILLEKMLTDRSSGMPLPAAVVLETIQGEGGIHVANDAWLQRVQTLCREHDVLLIVDDIQVGNGRTGEFFSFEKAGLSPDLICLSKSIGGGLPLSLVMIRPECDVWQPGQHTGTFRGNNLAFVAANAVLNHWNEGSFVDGIQVRSNTLQAFLSSIVSEHVSENWDLRGRGMIWGLDVRRGDLARKVIDTAFQNGLLLESCGSDDEVLKFIPALNIPEQQLQQGLQLFRQSLQTVFPNPSATTPTLIPSTGSPVTSFGSSMVVS

SEQ ID NO: 11602 - protein, 134 aa, Glycine max
MSPSLDLPPKGGFSFDLCRRNAMLQNKGLKAPTFLKTGTTIVGLVFQDGVILGADTRATEGPIVADKNCEKIHYMAPNIYCCGAGTAADTEAVTDMVSSQLQLHRYHTGRESRVVTALTLLKKHLFNYQGHVSA

SEQ ID NO: 11603 - protein, 335 aa, Pyrococcus furiosus DSM 3638
MIGSIFYSKKFNLHRPSEYHPENPKRLEIVLSKVRELGLEERIEEPNPVEETFVEKIHDRDYINFVKEAVEKGITRLDPDTYVSPGTWSAALLALGAARSAALSALHYGGLHMALVRPPGHHAGRRGRAMGAPTLGFCIFNNAASAVVTLKEEGVGKVVVIDFDAHHGNGTQEIFWNDPDVIHIDLHERDIYPGSGDVSEVGGSNAYGSKINLPMPHYSGDGDYIYVWDEIVLPIVEEVKPKVIVISAGFDGFKGDGLTTLRLTESFYSYAGATLNKYPLAFILEGGYGVGLDKGFPAFIMGYEEGKAKAREEPRYETLKLAEEVKDILSPWWSL

SEQ ID NO: 11604 - protein, 296 aa, Rhizobium sp. 2M164
RGKTQIKEFDEFPTLEQLPLWGFDGSSTQQAEGRSSDCVLKPVAIYPDPARTNGALVMCEVMMPDGVTPHASNARATILDDEHAWFGFEQEYFFYQNGRPLGFPEQGYPAPQGPYYTGVGYSNVGDVAREIVEEHLDLCLAAGINHEGINAEVAKGQWEFQIFGKGSKKAADQIWMARYLLQRLTEKYGIDIEYHCKPLGDTDWNGSGMHCNFSTKFLREVGGKEYFEALMAQFDKNLMDHIAVYGPDNDKRLTGKHETAPWNKFSYGVADRGASIRVPHSFIKKDYKGYLEDRRP

SEQ ID NO: 11605 - protein, 417 aa, Saccharomyces cerevisiae
MTDPIRTKPKSSMQIDNAPTPHNTPASVLNPSYLKNGNPVRAQAQEQDDKIGTINEEDILANQPLLLQSIQDRLGSLVGQDSGYVGGLPKNVKEKLLSLKTLLCELFEVEKEFQVEMFELENKFLQKYKPIWEQRSTMISGQEQPKPEQIAKGQEIVESLNETELLVDEEEKAQNDSEEEQVKGIPSFWLTALENLPIVCDTITDRDAEVLEYLQDIGLEYLTDGRPGFKLLFRFDSSANPFFTNDILCKTYFYQKELGYSGDFIYDHAEGCEISWKDNAHNVTVDLEMRKQRNKTTKQVRTIEKITPIESFFNFFDPPKIQNEDQDEELEEDLEERLALDYSIGEQLKDKLIPRAVDWFTGAALEFEFEEDEEEADEDEDEEDDDDHGLEDDDGESAEEQDDFAGRPEQAPECKQS

SEQ ID NO: 11606 - protein, 249 aa, Cucumis sativus
MGKCYPVVSEEYQKAIEKAKRKLRGFIAEKNCAPLMLRLAWHSAGTFCKDSKTGGPFGTMRFKSELAHGANNGLDIAVRLLEPIKEQFPILSYADFYQLAGVVAVEVTGGPDVPFHPGREDKPEPPPEGRLPDATKGSDHLRDVFYTMGLSDQDIVALSGGHTLGRAHKERSGFEGPWTTNPLIFDKSYFTELLTGEKEGLLQLASDKALLSDPVFRPLVEKYAADEDAFFADYAEAHQKLSELGFADA

SEQ ID NO: 11607 - protein, 597 aa, Zea mays
  unsure (1)..(597): unsure at all Xaa locations
MAAVAAATSHLLRHHRNPHLLLLRAAISSSRALPQQPELSPDPTAGTPDLAGAAPLPPNPSTGSPFYTQNWRNPAAANPPSSLLPTVVAGSPFGAQHFMAAFYDAPDVTGLKETFAKYMAEQRWEDMKHLFDHWVRSLDAATGKPNHPDVDLFNHYLRANLMTRALPHEMLDLADHMLEFELQPNTASYNLVLKSMVASQETEGAEKLIERMLQTGTFPDDESYNLVVGLLIRQNLVDSSLKYLDLMLKSGYMLSLTVFTDYIRACMRSGRLDTLTSIIEKCKTTDKNKVLCPEWTWCIDIADAAFEANNSKLALFALEYLARWIARGENVKPPVQLSVNEGLVISALSAAGRTYNTDLLNAAWSLLRKSLRQKRAPTQETYLAKIYAHSSIGQLQRAFGTLREFENAYGNSEDIDLELFSPFTSLHPLVVACCKDGFSTLDSVYGQLENLIHADPPYKSLAALNCVVLGCANIWDINRAYETFVAIKEKFDLTPDIHSYNALLCAFGKLKQTGEACTPSXLANKDPKAALAIIDEMVDAGFTPSKDTLMKVRRRCSRESDFDSDEKVQSLAKQFNYRMGGENRREMLYSMEYNPVY

SEQ ID NO: 11608 - protein, 244 aa, Buchnera aphidicola str. APS (Acyrthosiphon pisum)
MNINRQTAFITGANQGIGKAIAKKLIKKGIQVIGTSTTEDGVKRINDYLEGNGFGFVLNLKNIDSITEKIQEIYKKKHSIDILINNAGIKEDNLLVNMKSTEWDDVIKTNLSSVFHLVKSVIRSMIKKRQGRIITIGSVIAYTGNKGQVNYSASKSGLIGFHKSLALEVASKGITVNIVSPGLIKTNFTEKLNSIQYQKYLSNIPMKRFGQKEEVADAVIFLASKKASYITGHTLHVNGGMYMI

SEQ ID NO: 11609 - protein, 380 aa, Saccharomyces cerevisiae
MNCIPSPISERKIQINNEDCIGKENAFHTIPRESSINLTPHSTNEKKVLSEVNSNKIDSLQLPRGKLQRDSTHLEKTRKRQLSNDSTDPIEPKTVKKIKCHQWKNLDSIEMDDPFMVAEYTDSIFSHLYEKEIQMLPTHNYLMDTQSPYHLKSSMRALLIDWLVEVHEKFHCLPETLFLAINLLDRFLSQNVVKLNKLQLLCITCLFIACKFEEVKLPKITNLAYVTDGAATVEGIRKAELFVLSSLGYNISLPNPLNFIRRISKADNYCIETRNMAKFIMEYSICCNKFIHLKPSYLAAMSMYIARKIKNENSKWDETFIHYSGGIDIESDPAFKDFISELVEDIAVPDTNLDSLRLKYKKPKHGMVYFKVFDWCKQKR

SEQ ID NO: 11610 - protein, 454 aa, Ferroplasma acidarmanus
METYGLKRILGLRSAIIINLGAIIGAGIFVIIGIAAGKAGPAIIISIFVSAIIAIFTGLSFSEIAQHTSKEGGVYEYAKESFAPSAGFIGGTMWTFSNMIAISAVSLSTGSYINSLFHLHIDLIVFGIPIIIMFAILNMLGIKNSAKTLSILVGINIAILIIFVVSGLFYFKLTDFSNFDPHGFTGIMEGSALIFFAFTGFSRITTIGDEVKNPEKNIPKAIIISIIISSALYSIVAVVAIGLIPSSNLASASAPLSAAIAVLHNSYILIIVAIGGITATAGVVLTGILGTSRVLYAMGRDREIPGTFGRIDKFGTPFYSILLSMAISLLFVYFVGFATIIEASNVSVLIAYSIIDFSAIMLWRKVKRENPKHMREQKYFFIIPLIGMATIFITISYLGLHAIEISLAVLALVSGIYGIKHVMESGGYIRKAKQIIPGYSKVRLFGRSRQQIKK

SEQ ID NO: 11611 - protein, 228 aa, Hyacinthus orientalis
MGRGKIEIKRIENTTSRQVTFCKRRNGLLKKAYELSVLCDAEVALIVFSTRGRLYEYSNSNSVKTTIERYKKACTDTTNTGTVSEANSQYYQQEATKLRQQITNLQNTNRTLMGESLSTMSLRELKQLEGRLERGINKIRTKKNELLSAEIEYMQKREAEMHNDNMYLRNKIAENERAQQQMNMLPSTATEYEGIPQFDSRNFLQVSLMEPNNHHYSRQQQQTALQLG

SEQ ID NO: 11612 - protein, 347 aa, Prochlorococcus marinus subsp. marinus str. CCMP1375
MNRILVTGGAGFIGSHTCITLLESGYDLLIIDSFINSSEVSLKRVKEMSDNKNINYLKGDIRNLEFLDSIFSNAIQEGKPIDAVIHFAGLKSVSESTKIPLTYWDVNVVGSIALFSIMRKYKCYTIVFSSSATIYGNTDKVPIKEDSLISPINPYGESKATVEKILSDLSLSAPFDWRIACLRYFNPVGAHPSGRIGEDPLGIPNNLFPYITNVAGGQIKQVEVFGNDWPTQDGTGVRDYVHVLDLAEAHKSALECLFAEPAQLLILNLGNGFGLSVLEIINTFSRVNNCEVPYVFAARRPGDIAISYADIALSKARLNWYPKRSIEDMCRDTWRWKLNNPIGYRSK

SEQ ID NO: 11613 - protein, 156 aa, Zea mays
  unsure (1)..(156): unsure at all Xaa locations
MAASDGENRCFGGGPGWGTGEQFLQKGFKNXREGPESKIILDRETQRSRGFGFVTFSTEEAMRNAIEGMNGKELDGRNITVNEAQSRGGRGGGGGGYGGGRGGGGYGGGGRRDGGGGYGGGGGGYGGGGGYGGGGGGYGGGNRGGGYGNSDGNWRN

SEQ ID NO: 11614 - protein, 232 aa, Lactococcus lactis subsp. lactis
MNIITTDPLFGFVLTVLVFMIGVRINENFRKPWTNPLLFATVVIILILSLAHIPYKNYYIGGSIINDLIGPSTVALGIPLYKTFHLMKHHARSIVSSIAIAALVNCIFTALCAKFFSLSKLASLSIFPKSVTTAMAMGISDKMHGVEQITVVVVVATGILTSVLGGPLLKLFRITDPVAQGIALGGTGHAVGTGTAIELGKTQGAMAALSIGVTGIMYVIFAPIIAKIILGY

SEQ ID NO: 11615 - protein, 139 aa, Glycine max
AANADVEGALGDNDPVDVVEIGERRANIGDVLRVKPLAALAMIDEGELDWKIVAISLDDPKASLVNDVDDVEEHFPGTLTAIRDWFRDYKIPDGKPANRFGLGNKPTSKEYALKVIEETNESWEKLVKRKIPAGELSLA

SEQ ID NO: 11616 - protein, 335 aa, Zea mays
  unsure (1)..(335): unsure at all Xaa locations
MAGQEVANKRVVLKRYVTGFPGADDMEVVTGTARVAVPPGSTAMVLKNLYVSCDPYMRGRMTKHERPSYVPDFVVGEVLKNFGGFQVXHLVWGMTGWEEYTLIHNPESFFKINHPELPLSYYTGVLGMPGLTAWAGFFDVGKPKKGDNVFVSAASGAVGQLVGQFAKLTGCYVVGSAGSDEKVNLLKTKFGFDEAFNYKKEQDLDAALRRYFPEGIDIYFENVGGSTLEAVLPNMRIHGRIPTCGMISQYNLEEPEGVHNLFEIIAKRLRMEGFMVFDYYGQYHKFEQEMAGYLKAGKIAYVEDIAEGLEKAPEALIGLFTGRNVGKQLVAIARE

SEQ ID NO: 11617 - protein, 261 aa, Zea mays
MAAAPAATSLLIRHNRNPHLLLLRAAISSSRALSQQPELSPDPTTGAPDPAGAAPLPPNPSTGSPLYSQNWRNPAAANPPSSLLPTVAAGSSFGAQHRMAAFYDKPDAAGLKETFAKYMAEQRWEDMKLLFDHWVRSLDAATGKPNHPDVDLFNHYLRANLMTGAVPHEMLDLADHMREFELEPNSASYNLVLKSMVADKESYGAEKLIERMLQTGTVPDEESYNLGVGLLIRQNLGDSSLKDLDLMLKIGYTPSLTVFLI

SEQ ID NO: 11618 - protein, 434 aa, Oryza sativa (japonica cultivar-group)
MAASAAASRAQRLSRIFSSSSPSVRPPKPGQVKEAPKPAPTKKAPAPGAEANPNLRRNAIDDIIKGLLRERDPDKLVSGFIAASSTHPRFRARHRVYDVAVSRLATFGRLDGVEAIIDAQKPFLETSKEGFAARLIRLYGHASMASHAAATFHDLPPQLKSTMTFNSLLAAYVEAGEFEALAAAFKEIPVSNPSVVPSVYSYNILLQALCKVPDLSAALDTMTLMEKSGISPDLVTFNTLLNGFYNHGDMDGAEKVWEMITERNMVPDAKNYNAKLRGLVAQGRIEDAVAVVEKMEKDGPKPDTISYNELIRGYCKDGRLEEAKKLFEDMAENGYVANRGTYHTLIPCLVKAGELDYALKCCHEIYGKNLRVDCFVLQEVVTALVTASRVEDATKIVELGWNNSYPRRILNIPHATEKNKEESISEEEEEPENA

SEQ ID NO: 11619 - protein, 126 aa, Zea mays
MCGGFLFRTFIFRPLVSCRRRVQLRHRPAPPRRTRTTPPLLLGQPSPAHSHPQCTGGVTPGSLQPHECGGRCAGRCSATAYQKPCLFFCRKCCAACLCVPPGTYGNKNTCPCYNNWKTKRGGPKCP

SEQ ID NO: 11620 - protein, 338 aa, Vibrio parahaemolyticus RIMD 2210633
MKVLVTGGMGYIGSHTCIQMIEAGMTPVILDNLYNSKSTVLERIEKVRGVKPTFIEADIRDKAALVEALKVHNIEAVIHFAGLKAVGESVEKPLEYYDNNVNGTLVLVDAMREAGVKSLVFSSSATVYGDPASVPITEDFPTSATNPYGRSKLMVEECLTDFQKANPDWSITLLRYFNPVGSHPTGELGEDPQGIPNNLMPFISQVAVGRREFLSVFGSDYPTKDGTGVRDYIHVMDLSDGHVAALEKVGSKAGLHIYNLGTGNGYSVLEMVKAFESACGKNVPYQLVERRPGDIAECWADPSKAMNELGWKASRTLEEMTGDTWRWQSNNPQGYPDA

SEQ ID NO: 11621 - protein, 152 aa, Oryza sativa; identical to SEQ ID NO: 2297

SEQ ID NO: 11622 - protein, 461 aa, Cytophaga hutchinsonii
MRNYFILLCVIFSNLTLYAQPCWLQIEAGSSFVIAMKADSTLWSWGSNSSGQLGDNTTDNKSIPSQFNTAKGWLKISSGNSHCIGLKKDGSIWTWGWNSEGQLGNGSLTKMLVPTQIGVDNDWMAVSAGQYNTFAIKNNGTLWGCGRNFEGQLGKGTTGSNVKTFIQIGTATDWAYVSVGAFHTMAIKTDGSLWAWGSNNNGRLGIGTTTTKNAPTKVGTATNWKSVYAAGSNTFAIKTDGSLWAWGYNYAGVLGDGTTTDRLSPVQIGTDNNWKTISSDGNTSFALKSDGTLWVWGDNNSGQFGNGTTTNSTLPIQIGTDNQWQHISINYSFLLAIKTDGSLWTWGYNYSGQLGNGTTTNTNLPVLVDCNLSLKVHEAISSENIVVYPNPTAGELTIKIKNQAAQNIHITIMNSVGQILQQKYITDESQLLDLSSQPNGMYLLKIQTTDNQVSLQKIQKF

SEQ ID NO: 11623 - protein, 435 aa, Nicotiana tabacum
MLINGFIYLKDWANAFAIFEDVIRDGLKPDVVLYNNIIRAFCGMGNMDRALRIVEQMKKERHRPTSRTFMPIIHAFAKAGAIRKALDVFDMMRRSGCIPTVQTYNALILGLVEKRQMDKAVEVVDEMLLAGIRPNERTYTTIMDGYASLGDTGKAFEYFSRIKDEGLELDVYTYEALLKACCKSGRIESALAVTKEMNAKNIPRNTFVYNILIDGWARRSDVWEAADLMQQMRQEGVQPDIHTYTSFVNACCKAGDMQKAMNTIQEMKRVGLNPMLKPIPLSYTVGHASLPEKALKCFEEMKKSGLKPDKAVYHCLMTSLLSRATVAEDYIITGIHRVCEEMVESGLTVDMGTAVHWSRCLRKIERTGGDITEALQKTFPPDWNSHRNLNAASYDTGNNEGLNDRVTTMVLCMRLTVTATVTMIQMPPRCNQKVA

SEQ ID NO: 11624 - protein, 153 aa, Zea mays
LYSSCHAYIIPKGKFCQGNPITIKTAQSASKGFSLLYTFIDTMTLCPGWLFLVIFMTVYFFVVRRKWSPHFLRFHVILAILLDTGSQAVATMCTWMPSIVYQGKPMQYLWMSIAFIQIFTVLECLRCALCGMYPNVPFISHTAFIHSDLNLFR

SEQ ID NO: 11625 - protein, 178 aa, Triticum aestivum
RLADKDVMLCIRPGEHGSTFGGNPLASAVAVASLKVVRDEGLVERAAKLGQEFTARGQKVQQKFPQIIREVRGRGLLNAVDLNNDALSPASAYDICIKLKERGILAKPTHDTIIRLAPPLSISPEELAEASKALSDVLEHDLPQLQKQIKKPESEAEKPVCDRCGRDFVRMSEASEQR

SEQ ID NO: 11626 - protein, 465 aa, Glycine max
MERRDKERLLKIRTLGNIRLIGELLKQKMVPEKIVHHIVQELLGPPDIKVCPAEENVEAICQFFNTIGKQLDESPKSRRINDMYFIRLKELSTNPQLAPRLRFMVRDVLDLRSNNWIPRREEVKAKTITEIHSEAEKNLGLRPGATASMRSNRVVSGAQGNTGPGGFPIARPGTGGLMPGMPGTRRMPGMPGIDNDNWEMPRTRSMPRGDISGIPTGGRGQSPFLSKTSTVNSKLLPQGSGGIISGRSSALVHGAGAPVRSPNLGFSAEPTPQIPSPVKAVSAIPSEKPQPPAAKLNIDELQRKTVSLLEEYFSVRLLDEALQCVEELKAPAYYPEFVKEAISLALDKSPPCVEPVANLFEYLLIKKILSARDIGTGCMLFASLLDDIGIDLPKAPNNFGEIIGKLVLAGGLDFKVVVEILKKVEDDRFQKAIFSSALQVISSVSGQAVLDSQASDIEACQSLFN

SEQ ID NO: 11627 - protein, 394 aa, Pseudomonas syringae pv. syringae B728a
MTGTYRCSAQRQRSKARASSIGENHMKSRAAVAFEPGKPLQIVEIDVEPPRKGEVLIKITDTGVCHTDAFTLSGDDPEGLFPVVLGHEGAGIVMEVGEGVTSVKVGDHVIPLYTAECGECLFCKSGKTNLCTAVRATQGKGVMPDGTSRFSYNGQPLYHYMGCSTFSEYTVVAEVSVAKINPDANPEHVCLLGCGVTTGIGAVHNTAKVQPGDTVAVFGLGGIGLAAIQGARQAKAGRIIAIDTNPAKFELARSFGATDCVNPKDHEQPIQQVIIEMTGWGVDHSFECIGNVHVMRAALECAHRGWGQSIVIGVAGAGQEISTRPFQLVTGRTWKGSAFGGVKGRSQLPKMVEDAMKGEIELAPFVTHTMGLDRINEAFDLMHEGKSIRTVIKY

SEQ ID NO: 11628 - protein, 213 aa, Triticum aestivum
QRPVIVNIRATGICGSDVHYWTHGRIGHFVCEKPMVLGHESSGVVVSVADDVTSLKVGDRVALEPGVPCRVCEMCKLGMYNLCPDMAFAATPPYDGTLCNYYKHAADFCYKLPDHISLEEGALIEPLSVGIHASRRGGVKLSDRVFVFGAGPVGLLTAAAAKAAGASHVTIADRDPARLAFAKEYCADETIHLTGARRLDQDSNDFAKEEAEK

SEQ ID NO: 11629 - protein, 326 aa, Oryza sativa (japonica cultivar-group)
MPKDRSTRAVSYERRRSRVSPYPSNGKGCARRSEESAAAAAAAAAKQAAEWEDVRCPVCMDHPHNAVLLVCSSHEKGCRPFMCDTSYRHSNCFDQYRKASKESSKDSGASAAAAPECSECQQPIKLSCPLCRGPVSHWTKDYDARKYLNVKVRACTKESCEFRGAYGQLRRHARENHPTVRPTQVDPERQRDWHRMEQQRDLGDLFSMLRSGLSAREDGIGVSEGEEDISERALHSPSITMVFIVRTGRSILHYREAFPGHHRRRTILLLGEAFGRESSPLGGASGSGDGDTTARENDEGDDDVTLSTEASAGSQHDGEVDGDPAH

SEQ ID NO: 11630 - protein, 303 aa, Bacillus cereus ATCC 14579
MKRWQMEWLLVSVALVWGANYTIGKYGVAYMSSIQFNSLRFLVASPVLLLITFLMERSLRIDRKDWLRLVAVGIVGTTMYQTMFMLSVKYTSATNASLLIAMSPIFTGILAVLHKQERFSMKVQIGSIVAFIGAAFVLLTGHTGGTTYEYAWLGNIIGLVAAIAWGWYPILAQPLITKYSAMRVTSWSTLIGIVPLVVYCLFNVNTLTWPVDMPSWGSLAYSIVFATIFGLAMWYVGISKIGSTKVMVYMYLVPLFAVIFAAVTIGEQINMMQLVGGLIIFIGLYVVKKGGIQKPALNLKKVS

SEQ ID NO: 11631 - protein, 244 aa, Zea mays
MGFLEDFQASVEALPSMLHRNYSLMRELDKSLHGVQLENEQRCQQEIEDIKHGLESGSITYDPAKLKFSEEAMEEQKHCVRIADEKVALATQTYDLVDAHIQQLDQFMRKLEEIRQGKEAAAAVTAGTAVATTATPTVNAGATTADANPKSGRSGERGRGGRKKAKSVPVPVPLPPIDLELPVDPNEPTYCLCNQVSYGEMVACDNPNCKIEWYHYGCVGVKEQPKGKWYCPNCIGFQKKRKGK

SEQ ID NO: 11632 - protein, 276 aa, Rhizobium tropici
WGFDGSSTMQAEGRSSDCVLKPVAIYPDPARTNGALVMCEVMMPDGVTPHESNSRATILDDEDAWFGFEQEYFFYQDGRPLGFPESGYPAPQGPYYTGVGYKNVGDVAREIVEEHLDLCLEAGINHEGINAEVAKGQWEFQIFGKGSKKAADQIWMARYLLLRLCEKYGIDIEFHCKPLGDTDWNGSGMHCNFSTKFMREVGGKAYFEALMAQFDKNLDAHIAVYGPDNHLRLTGKHETAPWNKFSYGVADRGASIRVPHSFIKNDYKGYLEDRRP

SEQ ID NO: 11633 - protein, 168 aa, Zea mays
  unsure (1)..(168): unsure at all Xaa locations
RKLPSPRFQVEVVLVDYDGSQPPKPAAGAVDNKSDADSSASTAVKENSVAPAESNKGTGSNDKDEVFSDSDDGEDGSSKERKERTAGAXQGSVNAAKPSQTSNVEKEASAAASRLDKAPDVTSLKTEVSSKGSSTAAADSSSMSEFKAIAADASVFMFGDEDDDYESE

SEQ ID NO: 11634 - protein, 234 aa, Clostridium acetobutylicum
MNSLVTSPVFGVLISLVAYLIGEFLKEKTKLSIFNPLLISIIILISFLLKFNIKYTDYNKGGQLISFFLSPATVALALPFYKKFSLFKKNALPIIIGILCGAASGIIYIILFSRLFNFSDALTESLLPKSITTPIGMELSRQLGGIPAITVVSIIITGILGTIVGPFLYKLLKFKDKVAMGIAMGACSHAVGTAKAMEIGETEGAMSSLTMALSGIITVFLAPLIWHLFLMLTK

SEQ ID NO: 11635 - protein, 169 aa, Triticum aestivum
  unsure (1)..(169): unsure at all Xaa locations
QEXEDHGDQITAPLLPNRPSTSRSSPEHHDDGHGESSENSPIEQVALTVPVGDDLDTPVLTFRMWVLGMASCAVLSFLNQFFWYRKEPLTITAISAQIAVVPLGRLMAAALPERAFLRGTRWEFTLNPGPFNVKEHVLITXFANAXAGTVYAIHVVTAVRVFYGKTSLP

SEQ ID NO: 11636 - protein, 405 aa, Saccharomyces cerevisiae
MNIGGGKFLLGRISNNPTSGIVGLANVGKSTFFQAITNSKLGNPANYPFATIDAECAKVNIPSVPLSNLLRIYQSAKCVPGTLTIYDIAGLTRGASQGHGLGNKFLNDIRHVEGIFQVVRGFLKEDITHIEGNVDPVRDLSVVQDELILKDLEFLENIRERLSKKMRMVSKNSKEHQEMKIETELLDALEEHLFNGKKIRHFKDHWNLDEVKILNKHNFLTSKPTLILLNVSPQDYVRNENKFVRNIIEWINEFSPGDKFLLFSAEFESQLMECKGIASEYFDKIKEDTNVSDQQLVSAIPQIILEMRKLLNLISFFTCGPQEVHQWNIREGTTAQEAAGVIHSDLRETFISADVIKYDDLKKMEPPLNESLLKSKGLIKRAGKQYIMQDNDIALFKAAGGKIKK

SEQ ID NO: 11637 - protein, 292 aa, Saccharomyces cerevisiae
TLVHVASVEKGRSYEDFQKVYNAIALKLREDDEYDNYIGYGPVLVRLAWHISGTWDKHDNTGGSYGGTYRFKKQFNDPSNAGLQNGFKFLEPIHKEFPWISSGDLFSLGGVTAVQEMQGPKIPWRCGRVDTPEDTTPDNGRLPDADKDAGYVRTFFQRLNMNDREVVALMGAGALGKTHLKNSGYEGPWGAANNVFTNEFYLNLLNEDWKLEKNDANNEQWDSKSGYMMLPTDYSLIQDPKYLSIVKEYANDQDKFFKDFSKAFEKLLENGITFPKDAPSPFIFKTLEEQGL

SEQ ID NO: 11638 - protein, 775 aa, Glycine max
MACENDNNNKGLLLALGLVLCVTLSFFPRVTEGRVPFACDPRNGLTRGFKFCNTHVPIHVRVQDLIARLTLPEKIRLVVNNAIAVPRLGIQGYEWWSEALHGVSNVGPGTKFGGAFPGATMFPQVISTAASFNQSLWQEIGRVVSDEARAMYNGGQAGLTYWSPNVNIFRDPRWGRGQETPGEDPTLAAKYAASYVKGLQGDSAGNHLKVAACCKHYTAYDLDNWNGVDRFHFNAKVSKQDLEDTYDVPFKACVLEGQVASVMCSYNQVNGKPTCADPDLLRNTIRGQWGLNGYIVSDCDSVGVFFDNQHYTKTPEEAAAEAIKAGLDLDCGPFLAIHTDSAIRKGLISENDLNLALANLISVQMRLGMFDGEPSTQPYGNLGPRDVCTPAHQQLALEAARESIVLLQNKGNSLPLSPSRLRIVGVIGPNADATVTMIGNYAGVACGYTTPLQGIARYVKTAHQVGCRGVACRGNELFGAAEIIARQVDATVLVMGLDQTIEAETRDRVGLLLPGLQQELVTRVARAAKGPVILVIMSGGPVDVSFAKNNPKISAILWVGYPGQAGGTAIADVIFGATNPGGRLPMTWYPQGYLAKVPMTNMDMRPNPATGYPGRTYRFYKGPVVFPFGHGLSYSRFSQSLALAPKQVSVQILSLQALTNSTLSSKAVKVSHANCDDSLETEFHVDVKNEGSMDGTHTLLIFSKPPPGKWSQIKQLVTFHKTHVPAGSKQRLKVNVHSCKHLSVVDQFGVRRIPTGEHELHIGDLKHSINVQTTH

SEQ ID NO: 11639 - protein, 207 aa, Pirellula sp.
MGEWMMRKRMVYFTSIAVLVAIGVFVFNKTTRAGYESAEYKVIESDGNFEVREYPDLMLVATSTKIDAQGRDGSFMKLFRYISGANESEQKISMTTPVFMENDKADSEVQMGFVMPKEVAVEGVPSPTGADVDVRKRSGGRFAVLRFSGRLNKKLAKESETKLRTWMESKGLAADDSPEASGVESASYDPPFTPGPLRRNEVLIRLK

SEQ ID NO: 11640 - protein, 185 aa, Zea mays
MSDMIARGKALYWGTSEWSADEIRAAYGIAERHHLHKPVVEQPQYNLFHRTRVEQEYARLYDDYGLGLTTWSPLASGLLTGKYRNGVPPGSRAELHGYDWLRDRLTDPASNDVVERLGAIAAELGCNTAQLAIAWVLANPHVSSVITGASRIEQIGDNMRAIDVAAQLTPEIKQRIAEAVGDTYE

SEQ ID NO: 11641 - protein, 200 aa, Zea mays
MAMVLGMVLGKIPVETPKHEVLHTGAGYEIRKYPPSIAAELTYDPKEMRGDPDGGFTVLANYIGVLGKPQNTKPEKIAMTAPVITTEPIAMTAPVITDDQQAPGKVTMQFLLPSKYTRVEEAPRPTDERVVIREVPERKFGVARFSGVATDRTVREKAKGLKAALEKDGYTIKVPFVLARYNPSFTLPPLRTNEVMFPVE

SEQ ID NO: 11642 - protein, 373 aa, Nicotiana tabacum
MAIEHNEQQELSQSFLLDALYCEEEEEKWGDLVDDETIITPLSSEVTTTTTTTTKPNSLLPLLLLEQDLFWEDEELLSLFSKEKETHCWFNSFQDDSLLCSARVDSVEWILKVNGYYGFSALTAVLAINYFDRFLTSLHYQKDKPWMIQLAAVTCLSLAAKVEETQVPLLLDFQVEDAKYVFEAKTIQRMELLVLSSLKWRMNPVTPLSFLDHIIRRLGLRNNIHWEFLRRCENLLLSIMADCRFVRYMPSVLATAIMLHVIHQVEPCNSVDYQNQLLGVLKINKEKVNNCFELISEVCSKPISHKRKYENPSHSPSGVIDPIYSSESSNDSWDLESTSSYFPVFKKSRVQEQQMKLASSISRVFVEAVGSPH

SEQ ID NO: 11643 - protein, 106 aa, Zea mays; identical to SEQ ID NO: 498

SEQ ID NO: 11644 - protein, 291 aa, Rhizobium sp. USDA 1079
  unsure (1)..(291): unsure at all Xaa locations
RGKTQIKEFDAFPTLEQLPLWGFDGSSTQQAEGRSSDCVLKPVAVYPDPVRTNGALVMCEVMMPDGKTPHPSNTRATVLDDESAWFGFEQEYFFYKNGRPLGFPEQGYPAPQGPYYTGVGYKNVGDIARQIVEEHLDICLAAGINHEGINAEVAKGQWEFQVFGKGSKKAADEVWLARYLLLRLTEKYGIDVEFHCKPLGDTDWNGSGMHANFSTAYLREVGGKDYFEALMAAFEKNLHDHINVYGPDNHLRLTGKHETAPWDKFXYGVADRGASIRVPHSFVNNGYRGYL

SEQ ID NO: 11645 - protein, 206 aa, Triticum aestivum
MATASIAVRSAFGVALAALIAARAVRRRSLDAWGGAAGFAVMALHLACGYRYGALLLAFFFTSSKVTKIGEDRKRRVEEDFKEGGQRNWIQVLANSAIATVLVILLAIMTGGQDQCLDSNGSKVITGIIGAIIGHYCCCNGDTWSSEIGVLSDEQPRLVTTLKVVSKRGPTVTKISGMTILDNDAVNAVSVLLTSVITAYACIVFF

SEQ ID NO: 11646 - protein, 1085 aa, Schizosaccharomyces pombe
MNDKALRTEALSVGLEPPSFKDLLIPIPNSGTKKKNKKKKKPKAKKNVETQANVDLLGSAGTDSAVTDVGANNGVIDHQASLELSNLNSRISHPQLVSANGDDSSLINVEGISSTDWQFTLESDDTIEHSPQCILSTSSFVDEAEFPVHIPGLEDATSSNMSPNSVQNNMNLNTVALGSSTSSKRKKKKKKKSKANSASLNVDDQRDFEQVYSTDVAITYRNGQALSYYNGSVRQASMNNNVNNNKSKDIWSSSNTEEREQIREFWLSLSESERRSLVKVEKEAVLQKMKEQQKYSCSCSVCGRKRLAIEEELEVLYDAYYEELEQYANIQRNLANTESVNASDEGSDKSQKGIISDSPKLLSIPLNNVPSKSLNDDITQDELNSSNADVDEEVIETTSLEEKNVDNQEFVTSISNGNQTLEDTSHSPQTQPPFQPPYPSKADEKNSYHSDLYNFGSSLTVKGGILTVADDLLKNDGKKFIEMMEQLAERRMQREDNSNFHEPELYESGLEYDEDEEEDEEDVDEDELDLMTDEQRMEEGRRMFQIFAARLFEQRVLQAYREKVAQQRQAKLLEEIEEENKRKQERELKKIREKEKKRDKKKQLKLAKEEERQRREAERLAEQAAQKALEAKRQEEARKKREEQRLKREQEKKQQELERQKREEKQKQKEREKKLKKQQQEADREKMAREQRLREEEEKRILEERKRREKLDKEEEERRRRELLEKESEEKERRLREAKIAAFFAPNQTKEGSDGCTTSSQLGLFEKKGDLVNDEDKLSSHLLDSVPNALRQAPIGLKNTNNLSERNASSNLLNSSLFSSFNSVNPLISLEPNPLNRTLNNSVNLTDFGRKPNGLHSPSSLLSNSNNFGLNPNARHSLSRANSPVHHYPFATPPSQRANKYPLNNGANVPALLNSFSSPQLSPLVNRVLNEPSSSPLSSSSLKSPLSKEGVLNQQGHEQYNFSLSPSIRNKLSPICRPSQGSSPKLKNNLSNTEERMGSRALLDDKTDSVITASNSTTSGLSRDESSNPNNYELLNAFNQNTWKISRSTSNKSLIPESPWGVALGAFTPNASTQSIPWGNRTWTD

SEQ ID NO: 11647 - protein, 656 aa, Chloroflexus aurantiacus
MSLSGGTMIQIPETTLPRLLFQNAERFGDKVALREKDYGIWQTVTWRQFADHVRAFAMGLHALGVRRGDVIAILGDNRPEWLYAEFAAQTIGAMSIGVYQDSVAEEVYYIVSAAGARVIVVEDQEQVDKIIEIWPRLEGVLKVIYYEPKGMRNYRQPYLADFPSIEELGRTYDREHPGLFEAELAAGKPDDVAILSTTSGTTGKPKLAMLTHRNMISQGAGLLSVDPLGPDDEFVSFLPLAWVGEQMVTVAAGMQCGFTINFPESASTVQENIREIGPRVMFSPPRIWENMLSQVQVKIQDSTPLKRAIFEWAMRQGYEMADTRFSGKQPDLWLRLRYGLARLLVFEMLKDHLGLRFLKRAYTGGAALGPDVFRFYHAIGVNLKQVYGQTESAGLSVIHRDGQIKFQTVGTPLPNTQIRIAENGEILVKSPSVFVGYYQNPEATAEALEDGWLHSGDAGYFDEDGHLIVIDRAKDVMTLHDGTKFSPQFIENKLKFSPYIKEAVVFGGDWPFVTAMINIDFANVGKWAENAQISYTTYTDLAQKPQVYALIRKDVERANADLPPAARIRRFLLLHKELDADDGELTRTRKVRRRLVAQRYQEIVDALYSDQDELEIETTITYQDGRTALIKTRLRIEEIDDPATTLAASPSRMAVR

SEQ ID NO: 11648 - protein, 394 aa, Methanosarcina acetivorans C2A
MKAVVYKGPRNVDVEEVKKPEIEKPTDVIIKVTSSGICGSDLHLYDGHGPDGLGTILGHEPMGVVEEVGDAVELVKPGDRVVIPFNVACGSCLNCIRGLTNMCLTMNPDAAIANYGYPGAGPYAGGQAEYLRVPYGDWACLKLPGEPGDEFEDDFVMLADIFPTAYYAAELAKVKTGKTVAVFGAGPVGLLAAYSSMLMGASEVYVVDKSDKRLKLAESIGAVPINFTDGDPVEMIMQIRQNNKNLMSSLRPGEEKVLGVDCAIDAVGYQALDRNNSEEFKPNQVLMDIARIIAPGGSIGVIGVYSPDPAGKDENEKQGYLTLPWAELWFKGVSIGTGPTPVKQMHGFLRNLIFNGKAKPSFIVSDRISIDEAPEAYKQFDKRDDVVKPIIKFH

SEQ ID NO: 11649 - protein, 215 aa, Glycine max
MAKDINLSSRTPLLLLLCFTTLTEAVWLTIPSKGTKCMSEEIQTHVVVLADYYVVADDVQGHQLQTISAKVTSPYGNNLHQNENVTHGQFAFTTTESGNYVACFWVNNKHQEGGGETTISLEWKTGIHAKDWDSVARKEKIEGVELELRKLEGAVEAIRDNLIYLKNREAEMREVSETTNARVAWFSIFSLGICILVSGLQLWFLKRFFRKKKLI

SEQ ID NO: 11650 - protein, 689 aa, Rhizobium leguminosarum bv. trifolii
MTDGTYGVRYQPDLIDGVNDDRANLEQFLAVVNRRTEHTIEGDFSGTSPATCFPNGSSFACSWDLDLAFQLGTALAAECQALGVNLLLGPGINIRRMPLGGRGYEYYSEDPVLTGYIRPAVIWELKGSGVGASLKHFACNNSEVQRTTMSSDVDERALREIYLAGFERAIRKGNPWTVMSSYNRLNGVQAAENKWLLTTVLRDEWHYDGVVVSDWHGIKDRAAAAKAGNDLDMPASKSRKKQLLAAVENGTVPLATIDQSCLRMLQLVRRVKAGERRDATWDLRENHTLARQMAAESIVLLKNEGNLLPLEMMAGRIAIIGDTAMDPIFQGWGCATTHPSMVDIPLDEIRAFAAPGVEVQHFPLGGGDKLKLAEAAIAGAASADVVLFFANTENGYDGEGSDRLHLGLADGQDALIARIATANPRTIVIVASPDAVEMPWLAEVPSVLATFFAGQGMGHAVASILFGRTNPSGKLTVTFPKRLQDVAAYLHYPGENDRHAYSEAIYVGYRYYDRRELSPLFPFRFGLSFTEFRYSDLELDRVVLKDGETLTATFSLTNTGRMTGKEICQLYGRPVKTRLHRPVRELKGFTKVGLKPGETKRVSIVFEARDTRYFDPELGQWLTDGGAYGIDVGASSRDIRLSAEVTCETPQLTPRRLTLETQPFLLFETPVGRERLAAFFRERLGLDGV

SEQ ID NO: 11651 - protein, 347 aa, Streptomyces avermitilis MA-4680
MARSINLAVIPGDGIGQEVVAQGLKVLSAALPSDVKLETKEFDFGARRYHATGETLTDADLDALKQHDAILLGAIGDPSVPSGVLERGFLLKLRFAFDHHVNLRPSKLLPGVETPLAGQPEIDFVVVREGTEGPYTGNGGTIRTGTPHAVATEVSLNTAFGIERVVRDAYARAQARPRKKLALVHKNNVLVHAGHLWTDIFNKVGEEFPDVTTEYMHVDAATIYLVTQPERFDVIVTDNLFGDIITDLAAAISGGIGVAASGNINPSGAYPSMFEPVHGSAPDIAGQGKADPSATILSVALLLRHLGYEAEAARIEEAVSADLAERVGKPARSTDEIGDALTVRVAG

SEQ ID NO: 11652 - protein, 259 aa, Zea mays
  unsure (1)..(259): unsure at all Xaa locations
MAGTVTVPGSSVPSTPLLKDELDIVIPTIRNLDFLEMWRPFFQPYHLIIVQDGDPSKVIKVPEGFDYELYNRNDINRILGPKASCISFKDSACRXCFGYMVSKKKYVFTIDDDCFVAKDPSGKDINALEQHIKNLLSPSTPFFFNTLYDPYREGADFVRGYPFSLREGAPTAVSHGLWLNIPDYDAPTQMVKPRERNSRYVDAVLTIPKGTLXFPMCGMNLAFDRQLIGPAMYFGLMGDGQPIGRYDDMWAGWCVKVIC

SEQ ID NO: 11653 - protein, 364 aa, Moraxella catarrhalis
  unsure (1)..(364): unsure at all Xaa locations
MTNTGTTDMKNIDTSPSNSEHYLPKKILVTGGAGYIGSHTLIELIQAGFVPVVYDNLSNSSFVAVQRVEQIVGKHIEFIQGDVLDKTHLDAVFKAHQFFAVVHFAGLKAVGESTKNPLKYYQNNVVGTLNLLELMAKYGVKNCVFSSSATVYGSSNRLPITEDMPXFCTSPYGQSKLMVEHILEDLVNADDTWNVVCLRYFNPIGAHESGRIGEDPTDIPNNLMPYISQVAVGNLKQLSVFGNDYETPDGTGVRDYIHVVDLAKGHVAALHYLVGQSVGIGFCPINLGTGQGTSVLQLIKAFESNTGQSVPYVITSRRTGDIAAYYASADKAKAILNWTAELDIERMCVDTWRWQSNNPHGYLS

SEQ ID NO: 11654 - protein, 228 aa, Gossypium herbaceum
FTSLCHTDVYFWEAKGQTSLFPRIFGHEAGGIVESVGEGVTHLKPGDHVLPVFTGGCGNCRHCKSKESNMCDLLRINTDRGVMLSDGKTRFSINGKPIYHFVGTSTFSEYTVAHVGSVAKINPAAPLDKVCILSCGISTGLGATLNVAKPTKGSTVAIFGLGAVGLAAAEGARIAGASRIIGVDLNPNRFEEAKKFGCTEFVNPKDHNKPVQEVLAEMTNGGVDRSVE

SEQ ID NO: 11655 - protein, 101 aa, Glycine max
MISVDSAALINHGLHPMNSHHLFGTRYDHIHIVLCPLSFIPRLVVTLDTSVIALTGIPVMLVLLLYTSSMPERNYCCDFTGTRIDLSKHGHLTYHAPDDQY

SEQ ID NO: 11656 - protein, 144 aa, Gossypium longicalyx
LGTSTFSEYTVVHVGQVAKINPEAPLDKVCVLSCGMSTGFGATVNVAKPKKGGSVAVFGLGAVGLAAAEGARVCEASRIIGIDLNPNRFEEAKKFGCTEFVNPKDHNKPVQEVIAEMTGGGVDCSIECTGSTQAMVSAFECVHD

SEQ ID NO: 11657 - protein, 587 aa, Neurospora crassa
MAPAPAPLLRPAIPGARPGGRGPPRLGLAIPPSLSVKPVGNPGAPPARAAPPQLKLATPMGSTTIPHEQPAGRPGAQGYSASGASDSSAAHSRSGSFGPESNPTSADTRYSNVSFIGAQRPHGTPDPVSAVGSLYSNASEGGVGMERENSLHGLEAFDKLTLEKARTLDVEELDDDGWRIAMMEKRVEELGPLGEGAGGAVTKAKLKGGKTVFALKIITANPDKDVAKQIVRELGFNKQCASEHICRYFGAVVDTQSATISIAMEYCEGGSLDSVYKEVKKLGGRTGERVLGKIAEGVLHGLTYLHSKKIIHRDIKPSNILLCRNGEVKLCDFGVSGDYGTNGAANTFIGTSYYMAPERITGQSYTITSDVWSLGVTLLEVAQHRFPFPADGTDSQPRAGLIDLLTYIVRQPVPKLKDEPDANIFWTDKFKYFIDCCLEKDPNRRASPWRMLDHPWMLEIRSRRVNVARFLATTWRNHRTVSITQLVPAPVGEDPFGRRHLNPGRVIEEDADKDEQYEIDKILGRRTNFKHGRPILEYLIKWKGYRNQWNSYVLRPSLLQNASDLVYDYDTKNPVDDKEPKPKKPRK

SEQ ID NO: 11658 - protein, 745 aa, Pseudomonas fluorescens; identical to SEQ ID NO: 241

SEQ ID NO: 11659 - protein, 372 aa, Triticum aestivum
  unsure (1)..(372): unsure at all Xaa locations
MRYIGAPGVQPLKRQPYSAPAPPVLGXFVAQPLGSLCLTRFPGWTPPILVRSVLFLFLVTWLPLCYICIPQINTTPPXWSFYSIVDSSSCFSHSTQRQVHQRGSIGSSGYFCSFFDHGCDALAYAFGAFALSSTLRCGWYTFCYGVAEAIPVYVATWEHYLTNSLFQTLSVGIHESLMLIXYSHGCSTNPVIGTPWPPVIHHAKCRYAXIYLVWTVMQICXVAYVHVVRSMVGRPMLPRAMLLPFIALLAGVAVWCYLSPSDIMKNQPHLLVIGTGSAFGYLVGRMILAHLCDEPKGLKTGMCMALVVLPAAVANALTAKINDGTPLVDELLVILLYCATSVGLYMHLAIAGCHEIKDALGIYCFRIARKEA

SEQ ID NO: 11660 - protein, 332 aa, Zea mays
MSALKKSDKKAALDFAAWSFNVTTSVGLIMVNKALMATYGFSFATTLTGLHFVTTTLMTIVFRWLGLSQPSHLPLADLVKFVIFSNLSIVGMNVSLMWNSVGFYQIAKLCMIPASCLLEVVFDHVHYSRDTKLSIMVVLIGVAVCTVTDVSVNARGLIAAVIAVWSTALQQYYVHFLQRKYSLNSFNLLGHTAPAQAGSLLLVGPFADYLLTGKRVDHFSFSSLALFFLALSCFIAIGVNLSQFICIGRFSAVSFQVLGHMKTVLVLSLGFLFFGKEGLNLQVVLGMVLAVLGMIWYGNASAKPGGKERRSVLPLRSASLKGSSEEKGGAEK

SEQ ID NO: 11661 - protein, 333 aa, Streptococcus salivarius
MAILVLGGAGYIGSHMVDRLVEKGQEKVVVVDSLVTGHRAAVHPDAIFYQGDLSDQDFMRKVFKENPDVDAVIHFAAYSLVGESMEKPLKYFDNNTAGMVKLLEVMNECGVKYIVFSSTAATYGIPEEIPILETTPQNPINPYGESKLMMETIMKWSDQAYGIKYVPLRYFNVAGAKPDGSIGEDHGPETHLLPIILQVAQGVREKIMIFGDDYNTPDGTNVRDYVHPFDLADAHLLAVEYLRKGNESTAFNLGSSTGFSNLQILEAARKVTGKEIPAEKADRRPGDPDTLIASSEKARTVLGWKPQFDNIEKIIASAWAWHSSHPKGYDDRG

SEQ ID NO: 11662 - protein, 379 aa, Ralstonia metallidurans
MPGAAKHGGGTRLPRSHPSFPAMSQYRIAVIPGDGIGTEVMPEGIRVMDATARRFGIDFQWDHFDFSSYAYYERHGKMLPDDWFDTLVKYDAIYFGAVGWPAKIADHVSLWGSLLQFRRSFDQYVNLRPVRLMPGIKSPLADRKPGDIDFYVVRENTEGEYSSIGGRMFPGTEREIVMQETVMSRHGVDRILKFAFELAQKRPKKHLTSATKSNGISITMPYWDERVEAMAANYPGMKVDKYHIDILTAHFVQHPDWFDVVVASNLFGDILSDLGPACTGTIGVAPSGNINPDKVYPSLFEPVHGSAPDIAGQGIANPIGQIWCGAMMLEHLGHAEAGAAVLAAIEQVLAAGPGHAPLTRDIGGTASTADLGQAIAEAL

SEQ ID NO: 11663 - protein, 413 aa, Triticum aestivum
  unsure (1)..(413): unsure at all Xaa locations
MQRYSRAADVLGFVYLHPLSKCVASPAAAVSKVAGQPLEMEEVEVAPPRAHEVRIRILCTSLCHTDVTFWRLKDFPGQHPIILGHEAAGVVESVGEHVHEVAVGDTVVPVFSAQCGDCPDCLSDRSNICSGLPARPGMPRDGTTRFSFAATGEPIHNFIGVSSFTEYTVVDVARVVRIGPGVPPEKACLLSCGVSTGVGAAWKVAAVEPGSSVAVFGLGVVGLAVAQGCRMRGAKQIIGVDLNPEKWDIGKRLGITDFVNPNDIGEKAVSEVIKEMTGGGTDYCFECIGSTSVMAEAFQSSRKGWGKTVVLGVSSGGAPMSXIPPHDILMGRSVVGSLFGGLKPKADIPILAQKYLDKELELDEFVTHEMGFHDINAAFELLTQGKCLRCIIWMDGAKANGVEALDNGRACKA

SEQ ID NO: 11664 - protein, 151 aa, Pyrococcus abyssi
MKTLKMQRRVAAELLKCGENRIWIDPERVDDVASAITREDIRRLIKEGVIKKKPVKGQSRYRARIRHEQKKKGRHRGPGSRKGKKTARMGKKELWIKTIRALRKELRKLKEQKKIDRRTYRMLYIRAKGGQFKSKHQLYMFLEEHNLLKKR

SEQ ID NO: 11665 - protein, 222 aa, Hemerocallis hybrid cultivar
MLAAYWTTLAPNVEDYSGSVARVIAMGSGRVIQGILWCGDVTVERLKWGEQLLKRKMDPNAQSSRVSKEALQRMKRVKKVTKMSDKVVTGILSGVVRVSGYFTSSVVNSKAGKSFFGMLPGEVLLASLDGFAKICDAAEVAGKNIMETSSEVTTGVVSHRYGEQAAELTHEGFGAAGHAIGTAWSVFKIRKALNPKGALKPTTIAKSAVKSAAAGMRAKAKK

SEQ ID NO: 11666 - protein, 630 aa, Listeria monocytogenes
VKEKHNPRRKYCLISGLAIIFSLWIIIGNGAKVQAETITVSTPIKQIFPDDAFAETIKDNLKKKSVTDAVTQNELNSIDQIIANNSDIKSVQGIQYLPNVTKLFLNGNKLTDIKPLTNLKNLGWLFLDENKIKDLSSLKDLKKLKSLSLEHNGISDINGLVHLPQLESLYLGNNKITDITVLSRLTKLDTLSLENNQISDIVPLAGLTKLQNLYLSKNHISDLRALAGLKNLDVLELFSQECLNKPINHQSNLVVPNTVKNTDGSLVTPEIISDDGDYEKPNVKWHLPEFTNEVSFIFYQPVTIGKAKARFHGRVTQPLKEVYTVSYDVDGTVIKTKVEAGTRITAPKPPTKQGYVFKGWYTEKNGGHEWNFNTDYMSGNDFTLYAVFKAETTEKTVNLTRYVKYIRGNAGIYKLPREDNSLKQGTLASHRCKALTVDREARNGGKLWYRLKNIGWTKAENLSLDRYDKMEYDKGVTAYARVRNASGNSVWTKPYNTAGAKHVNKLSVYQGKNMRILREAKTPITTWYQFSIGGKVIGWVDTRALNTFYKQSMEKPTRLTRYVSANKAGESYYKVPVADNPVKRGTLAKYKNQKLIVDCQATIEGQLWYRIRTSSTFIGWTKAANLRAQK

SEQ ID NO: 11667 - protein, 357 aa, Prochlorococcus marinus str. MIT 9313
MRQHRIVLLPGDGIGPEITAVAKLLLDALGHQHGFKLNFEQHPIGGVAIDASGSPLPASTLEACQASDAVLLAAIGSPRFDALPREQRPETGLLSLRAGLKLFANLRPVTILPALIDASSLKANVIKGVDLMVVRELTGGIYFGQPKGRIEADGDERAFNTMTYSRTEVDRIAKVAFELARDRSGKLCSVDKANVLDVSQLWRDRVDALAANYGDVELSHMYVDNAAMQLVRNPRQFDVLLTGNLFGDILSDEAAMLTGSIGMLPSASLGSEGPGLFEPVHGSAPDIAGQDLANPMAMVLCAAMMLRIGLKENDAARALEGSVERVLAAGFRTGDLMSEGCTQLGCAEMGEQLLQAL

SEQ ID NO: 11668 - protein, 364 aa, Bacillus anthracis str. A2012
MFTSRVIDTLQIKYPIIQAGMAGAITTPKLVAAVSNSGGLGTLGAGYMSPEQIREAIYTIRELTDKPFGVNLLLTKEVQIEEEKINLGKGLLSGVNREFGIEEEEQLKLPKSYKEQFQVLLEEKVPVVSFAFQTLEKEEINDLKRSGIKVIGTATHVAEAKVLAELGVDIIVGQGSEAGGHRGTFIGKEQDAMIGTFALIPQLVAAVPHIPIVAVGGVMNGQGLVAAFTLGAEAVQMGSAFLTSEESITHDVYKEAVLHSTDTSTTVTRAFSGKYARGIRNEFIEKHEGKEEGLPMYPVQNVLTSKIRQEAAKQNNGEYMSLWAGQASSLARIESAQHVVERVMEEANNVIEQLQNVYRKRPLE

SEQ ID NO: 11669 - protein, 444 aa, Brassica napus
MRGVIPNYHHSYTFIFFVILVLFPHVFSTNTLSPNENLTISSNKTLVSPGDVFELGFFKTTTRNSPDGTDRWYLGIWYKTTSGHRTYVWVANRDNALHNSMGTLKISHASLVLLDHSNTPVWSTNFTGVAHLPVTAELLANGNFVLRDSKTNDLDRFIWQSFDYPVDTLLPEMKLGRNLIGSENEKILTSWKSPTDPSSGDYSFILETEGFLHEFYLLKNEFKVYRTGPWNGVRFNGIPKMQNWSYIDNSFIDNNEEVAYSFQVNNNHNIHTRFRMSSTGYLQVITWTKTVPQRNMFWSFPEDTCDLYKVCGPYAYCDMHTSPTCNCIKGFVPKNAGRWDLRDMSGGCVRSSKLSCGEGDRFLRMSQMKLPETSEAVVDKRIGLKECREKCVRDCNCTGYANMDIMNGGSGCVMWTGELDDMRKYNAGGQDLYVKVAAASLVPS

SEQ ID NO: 11670 - protein, 252 aa, Pseudomonas aeruginosa UCBPP-PA14
MPLVMSGAAIACYSFLGFDAVSTLTEETRDPRRNIPRAILLITLLGGLIFIVTSYFVQLAHPSFAFDSADSAAYEIARNIGGDLFVTFFLVGLIVGQFTSGLSAQASASRLLFAMGRDGVLPRPFFGRLGKRFETPVNSIVLCGVVALLALQMDVTTSTSFINFGAFLAFSLVNLSVVFHYYLGAERRGPRETLLFLVFPGIGLVADLWLMASLDHLAIILGLCWLALGAVYLAAITHGFREQPPEMRFEEG

SEQ ID NO: 11671 - protein, 322 aa, Ralstonia metallidurans
MPQAVIAIHGGAGTITRAAMNAEREREYAAALEQVLLAGQRVLADGGSALDAVTEAVRLLEDSPLFNAGRGAVLTHAGTFELDAAIMDGQTLGAGAVACVKRLRNPVLAARAVLERSEHVLFAAEGAEAFAEAQGLELVGPEYYFTQARHDQWVRAQASTGMALLDHDAAALAARAGAADPIDPDNKFGTVGAVACDAAGNLAAATSTGGVTNKQVGRVGDTPIVGAGCYADDVAAVSATGTGEMFIRTVAAFDVSAQMRYAGLSLEESARRVVMEKLPAIGGRGGLIAVDRAGNVTLPFNTEGMYRGVARVGEPATVWIYG

SEQ ID NO: 11672 - protein, 287 aa, Triticum aestivum
MELGRLACLVAAAALALATAARCDPQVPCYFIFGDSLVDNGNNNYIVSLARANYPPYGIDFAGGPSGRFTNGLTTVDVIAQLLGFDNFIPPYAATGGDQLLNGVNFASAAAGIRAETGQQLGGRIPFAGQVQNYQTAVQTLVNILGDRDTASERLSQCIFTVGMGSNDYLNNYFQPAFYSTGSRYTPEQFADSLIADYRRYLQAMYSYGARKVALIGVGQVGCAPNELARYSPDGATCVGRIDGAIQIFNRRLVGLVDQMNTLPGAHFTYMNAYNIFNDILANAGAY

SEQ ID NO: 11673 - protein, 387 aa, Streptomyces avermitilis MA-4680
MSVGTSGAQKAPRAQDVRGTPASRRGDLAELGIDPDELPDGLVVADEHGRVICFNAAAARITAVSAADALGQRLERALPLEDLEGRRWWQLTDPYGGLAIRVAQPERNLLLPGGREVLVSVRYVRTRPTGPVRRLVVSLRDTEARRRTERSHAELIATVAHELRSPLTSVKGFTATLLAKWERFTDDQKKLMLETVDADANRVTRLIAELLDISRIDSGRLEVRRQPVDIGAAVGRHIQAYVAAGQPADRFLLRIEQPLPALWADPDKIDQVLSNLLENAVRHGEGTVTIDVTPSASPRERTDDEGTAHAATSVTVSDEGPGIPEESMNRVFTRFWRGSKRGGTGLGLYIVKGIVEAHGGGITVGRAPGGGAEFRFTLPVATPAYLL

SEQ ID NO: 11674 - protein, 966 aa, Oryza sativa (japonica cultivar-group)
MAIRRMRLALSLLCVLMTIGTGTASDEPALLALKAGLSGSSSSALASWNTSASFCGWEGVTCSHRWPTRVAALDLPSSNLTGTLPPAVGNLTFLRRLNLSSNQLHGEIPPAVGRLRRLLVLDMDHNSISGVIPANLSSCISLTILRIQSNPQLGGRIPPELGNTLPRLKKLQLRKNSLTGKIPASLANLSSLQHLSLSYNKLEGLIPPGLGDIAGLRYLFLNANNLSGELPLSLYNLSSLMMLQVGNNMLHGSIPSDIGRMLPGIQVFGLDVNRFTGVIPHSLSNLSTLTDLYLSDNKFTGFVPPNLGSQLQEFVLANNSFSGQLPRPIGNLSTTLQMLNLDNNNISGSIPEDIGNLVGLSFLDLGFNSILSGVIPESIGKLTNLVEISLYNTSLSGLIPASVGNLTNLNRIYAFYCNLEGPIPPSLGDLKKLFVLDLSYNHLNGSIPKEIFELQSLSWFLDLSYNSLSGPLPSEVGSLVNLNGMDLSGNQLSGQIPDSIGNCEVMEALYLEENSFEGGIPQSLSNLKGLTILNLTMNKLSGRIPNTIARIPNLQQLFLAHNNFSGPIPATLQNLTTLWQLDVSFNKLQGEVPVKGVFRNLTFASVVGNNLCGGIPQLHLAPCPILNVSKNRNQHLKSLAIALPTTGAILVLVSAIVVILLHQRKFKQRQNRQATSLVIEEQYQRVSYYALSRGSNEFSEANLLGKGRYGSVFRCTLDDESALVAVKVFDLQQSGSSKSFEAECEALRRVRHRCLIKIITCCSSIGPQGQEFKALVFEFMPNGSLDGWIHPKSSNLTPSNTLSLSQRLNIAVDIFDALDYLHNHCQPPIIHCDLKPSNILLSEDKSAKVGDFGISRILPKSSTKTLQSSKSSIGIRGSIGYIAPDIADPTIWLHEEENVADVKNESIKTRIIQQCLVSVLRLGISCSKQQPRERMMLAEAVSEMHATRDEYLRSWMVGHEEHSTVS

SEQ ID NO: 11675 - protein, 765 aa, Escherichia coli O157:H7 EDL933
MKWLCSVGIAVSLALQPALADDLFGNHPLTPEARDAFVTELLKKMTVDEKIGQLRLISVGPDNPKEAIREMIKDGQVGAIFNTVTRQDIRAMQDQVMELSRLKIPLFFAYDVLHGQRTVFPISLGLASSFNLDAVKTVGRVSAYEAADDGLNMTWAPMVDVSRDPRWGRASEGFGEDTYLTSIMGKTMVEAMQGKSPADRYSVMTSVKHFAAYGAVEGGKEYNTVDMSPQRLFNDYMPPYKAGLDAGSGAVMVALNSLNGTPATSDSWLLKDVLRDQWGFKGITVSDHGAIKELIKHGTAADPEDAVRVALKSGINMSMSDEYYSKYLPGLIKSGKVTMAELDDAARHVLNVKYDMGLFNDPYSHLGPKESDPVDTNAESRLHRKEAREVARESLVLLKNRLETLPLKKSATIAVVGPLADSKRDVMGSWSAAGVADQSVTVLTGIKNAVGENGKVLYAKGANVTSDKGIIDFLNQYEEAVKVDPRSPQEMIDEAVQTAKQSDVVVAVVGEAQGMAHEASSRTDITILQSQRDLIAALKATGKPLVLVLMNGRPLALVKEBQQADAILETWFAGTEGGNAIADVLFGDYNPSGKLPMSFPRSVGQIPVYYSHLNTGRPYNADKPNKYTSRYFDEANGALYPFGYGLSYTTFTVSDVKLSAPTMKRDGKVTASVQVTNTGKREGATVVQMYLQDVTASMSRPVKQLKGFEKITLKPGETQTVSFPIDIEALKFWNQQMKYDAEPGKFNVFIGTDSARVKKGEFELL

SEQ ID NO: 11676 - protein, 209 aa, Medicago sativa
CGSGWAFSTTGALEGANYLATGKLVSLSEQQLVDCDHVCDPEERNSCDSGCNGGLMNNAFEYILQSGGVVSEKDYAYTGRDGSCKFDKSKIVASVSNFSVVSLDEDQIAANLVKNGPLAVAINAAWMQTYMSGVSCPHICAKARLDHGVLLVGFGSGGYAPIRLKEKPYWIIKNSWGQNWGEEGYYKICRGRNVCGVDSMVSTVAAAQS

SEQ ID NO: 11677 - protein, 246 aa, Sulfolobus solfataricus
MMKAKVIDAVSFSYILRTVGDFLSEANFIVTKEGIRVSGIDPSRVVFLDIFLPSSYFEGFEVSQEKEIIGFKLEDVNDILKRVLKDDTLILSSNESKLTLTFDGEFTRSFELPLIQVESTQPPSVNLEFPFKAQLLTITFADIIDELSDLGEVLNIHSKENKLYFEVIGDLSTAKVELSTDNGTLLEASGADVSSSYGMEYVANTTKMRRASDSMELYFGSQIPLKLRFKLPQEGYGDFYIAPRAD

SEQ ID NO: 11678 - protein, 263 aa, Pyrobaculum aerophilum str. IM2
MEYCNEKLINRYTVAMAMDPYLFAVPSIAALAALALRKGYLTPRGAVSATVVGSAVAVAHMGLFALLTFFFVTSSLFTKLKAQWKREMGLKDVAGRSLRQVVGVGTPIAVFAVMYLATGDSKFLGASAVAVAVATADTWASELGVAYGGVPRYILAPWRRVERGVSGGVTPVGTAASVAGAFAIALLSPLVGVGGPVVAIAALGYLGELLDSVLGATLQTKYICGGRITETPSSGCVKRGFLSNEAVNLITGIAMGLLYLAIV

SEQ ID NO: 11679 - protein, 310 aa, Triticum aestivum
MSGGGGGGSAATQGQQELQLPPGFRFHPTDEELVMHYLCRRCAGAPIAVPIIAEIDLYKFDPWQLPKMALYGEKEWYFFSPRDRKYPNGSRPNRAAGSGYWKATGADKPVGTPKPLAIKKALVFYAGKAPKGEKTNWIMHEYRLADVDRSARKKNSLRLDDWVLCRIYNKKGGMEKPAAVDRKPAAMGGYGGGPGAMASSPPEQKPVMGMNANGGGGGAQPFRDFAAYYDRPSDSMPRLHADSSCSEQVLSPEFPAGEVQSQPKISEWERSFASGGDPVNPAAGSMLEPNGGFGGDPLLQDILMYWGKPF

SEQ ID NO: 11680 - protein, 379 aa, Arabis glabra
  unsure (1)..(379): unsure at all Xaa locations
MITTGXIIRCKAAVAWEAGKPLVMEEVEVAPPQKHEVRIKILFTSLCHTDVYFWEAKGQTPLFPRIFGHEAGGIVESVGEGVTDLQPGDHVLPIFTGECGDCRHCHSEESNMCDLLRINTERGGMIHDGESRFSINGKPIYHFLGTSTFSEYTVVHSGQVAKINPDAPLDKVCIVSCGLSTGLGATLNVGKPKRGQSVAIFGLGAVGLAAAEGARIAGASRIIGVDLNSKRFDQAKEFGVTEFVNPKDHDKPVQQVLAEMTDGGVDRSVECTGSVQAMIQAFECVHDGWGVAVLVGVPSKDDAFKSHPMNFLNERTLKGTFFGNYKPKTDIPGVVEKYMNKELELEKFITHTVPFSEINKAFDYMMKGESIRCIITMGA

SEQ ID NO: 11681 - protein, 483 aa, Staphylococcus epidermidis ATCC 12228
MGSFFNRMTRKENPTIYQSKDGHLKRTLRVRDFLALGVGTIVSTSIFTLPGVVAAEHAGPAVSLSFLLAAIVAGLVAFTYAEMASTMPFAGSAYSWINVLFGELFGWVAGWALLAEYFIAVAFVASGFSANLRGLIAPLGISLPKSLSNPFGSNGGVIDIIAAVVIILTALLLSRGMNEAARMENVLVILKVLAIILFVIVGLTAINFSNYIPFIPEHKVTETGDFGGWQGIYAGVSMIFLAYIGFDSIAANSAEAINPQKTMPRGILGSLIVAIVLFVAVALVLVGMFHYSQYADNAEPVGWALRESGHGIIAAIVQAISVIGMFTALIGMMLAGSRLLYSFGRDGLLPSWLSQLNHKHLPNRALVILTIIGVVIGSMFPFAFLAQLISAGTLVAFMFVSLAMYRLRKREGKDLPKPEFKLPLYPILPAITFILVLLVFWGLSFEAKLYTLIWFIVGIIIYLIYGIRHSKKNDEEAYQVPRK

SEQ ID NO: 11682 - protein, 174 aa, Oryza sativa
  unsure (1)..(174): unsure at all Xaa locations
MSMCIMFSSGICINHLSPTHTQTEPEMKKIFGAKKSKDPPPSIQDATERINKRGESVDDKIKKLDEELGRYKEQIRKTRPGPSQDAIKARAIRLLKHKRMYEEQRNMLYNQTYNLDQVAFAADGLKDAQQTMNAMKAANKELKGMMKTVKIEDIDNMQDEMTDLMDVSNEIQEX

SEQ ID NO: 11683 - protein, 142 aa, Oryza sativa
MAGIGPIRQDWEPVVVRKKAPTAAAKKDEKAVNAARRSGAEIETMKKYNAGTNKAASSGTSLNTKRLDDDTESLAHERVSSDLKKNLMQARLDKKMTQAQLAQMINEKPQVIQEYESGKAIPNQQIIGKLEGALGTKLRGKK

SEQ ID NO: 11684 - protein, 383 aa, Oryza sativa
MGNNASSTVMRMATCGKPDQGYCTWWPCEHNGHFVVVMGDFKDIACVSLIEAAPAAAYPRLWLLLAAPKPISPHPPPRPLDSRASSPISIHHPSSQRRRPTACFRLKDSSEMTSSMSKSDKKKVLDFAAWSFNITTSVGIIMVNKALMATHGFSFGLSQPSHLPIPDLIKFVIFSNLSIVGMNVSLMWNSVGFYQIAKLCMIPASCLLEVVFDRVHYSRDTKLSIMVVLIGVAVCTVTDVSVNAKGLAAAVIAVWSTALQQYFFLTLSCVIAIGVNLSQFICIGRFSAVSFQVLGHMKTVLVLSLGFLFFGKEGLNFQVVLGMILAVVGMIWYGNASAKPGGKERRSVLPVRSEKPNGALDEKDGSMIYKGNLAWRLRLVLKP

SEQ ID NO: 11685 - protein, 185 aa, Triticum aestivum
MAQAKGKVDCQTYTEIDTCSPGWVFDAAVTVAPSDDERLAHGGCRAVVDEEQDTKVKISEALEAAARAVGDDPVERSDAAAIRAAEVRAVGTGVDIPAGIAAQAQAAADANATAAHAEDKITIGDVLKWNATAKLPSGKAVTREDAAAAVEAEAAHAPGKATKPYGVGAALTEAARRNQEGTCRK

SEQ ID NO: 11686 - protein, 536 aa, Gossypium arboreum
MLQIAFSSYSWLLTASNQKDGMLFPVALSFLVAILGISLWHVWTIRKPKKDIAPLPPGPRGLPIVGYLPYLGTDNLHLVFTDLAAAYGPIYKLWLGNKLCVVISSAPLAKEVVRDNDITFSERDPPVCAKIITFGLNDIVFDSYSSPDWRMKRKVLVREMLSHSSIKACYGLRREQVLKGVQNVAQSAGKPIDFGETAFLTSINAMMSMLWGGKQGGERKGADVWGQFRDLITELMVILGKPNVSDIFPVLARFDIQGLEKEMTKIVNSFDKLFNSMIEERENFSNKLSKEDGNTETKDFLQLLLDLKQKNDSGISITMNQVKALLMDIVVGGTDTTSTMMEWTMAELIANPEAMKKVKQEIDDVVGSDGAVDETHLPKLRYLDAAVKETFRLHPPMPLLVPRCPGDSSNVGGYSVPKGTRVFLNIWCIQRDPQLWENPLEFKPERFLTDHEKLDYLGNDSRYMPFGSGRRMCAGVSLGEKMLYSSLAAMIHAYDWNLADGEENDLIGLFGIIMKKKKPLILVPTPRPSNLQHYMK

SEQ ID NO: 11687 - protein, 402 aa, Vibrio vulnificus CMCP6
MQKLTILGATGSIGASTLKVIEQNPDKFSVVALAADSNVEKMQQLCQRWQPEYAVMANKEAALRLKMALAVLAPNTQVLGGQEALCYVATLEQVDSVMAAIVGAAGLVPTMAAVKAGKRILLANKEALVMSGQLFIDEVEKSGAQLLPVDSEHNAIFQCLPQTVQGNLGRCDLASQGVSHILLTGSGGPFRYTDVAELEAVTPEQAIAHPNWSMGPKISVDSATMMNKGLEYIEAKWLFNASRDQLKVIIHPQSVIHSMVQYLDGSVLAQMGEPDMATPIALTLSYPERVKAGVKPLDFTQVGELTFLQPDFERYPCLALAIEACYLGQHATTTLNAANEVAVAAFLARQIKFTDIARVNDSVLNQVCKQSLASGLDSLESLLELDRMARTLADEVVRERAQ

SEQ ID NO: 11688 - protein, 355 aa, Borrelia burgdorferi B31
MKIFLTGIAGFIGFHVAKKLVEKGHEVLGIDVLNDYYELKFKHERLEALGFCSKDVKTHKIIKSEKYNNLSFAYLDILNKDKLLELFKDHKFTHVCHLAAQAGIRDSLENPDSYVSINIVGFFNVLDVCRVYKENIEHFVYASTSSVYGINENMPSSEDSITDHPLNLYAASKKSNEMMAHAYSASFNIPTTGLRFFTVYGTYGRPDMALYLFSDGIKNGKAINIFNNGNMARDFTYVGDIADGVYKVLKNPAKSDCNFDVKNPNSSTSSFPYRIYNIGTGHATKLLDFISELEANFDKKALKNYMPMQKADVVESCCDILKLKNDVGYEAKVSIKEGIKEFSQWYKMLESTKKT

SEQ ID NO: 11689 - protein, 493 aa, Leptospira interrogans serovar lai str. 56601
MFMVTELSCCQKMTQLKRSLNLFDSISLMFSSMVGPGIFITTGYILHQVPNPNIVLLAWILGGFLAVAGAMSYAKSASLFPYAGGDYVYLKEAYSPIVAFASGWLSLSINFSASISLSALAFSKSFFSLINPSWDIYFFEIPFLGLTISIGTAQILAMSAILVFTIVNFFGISTASRIQNLFTSVKILGLVSFVILGFVIGNYDISRFKSFSLFPSDLKGFELLLAGVIPVTYSYLGWNMITYVAEEVKDPDKNIYKAVLYSCALVTILYILMNFLFLSSGTLSELSGDKIGITASSALFGPKATVFITVFICWAFLASISAYIIGGSRIYFAMARDGFFFQNMAKLHSKHKSPYMSLLFQCGYACLFCFVKEIESLLYLITCSTLLLATITAYTPILFEKRNYKLKFRIPGYPYTTYLYIASNFGIIATLLWNKPTEAFWGVGFTFLSIPMYYYFKIMQNTLSKNSTPLETPEVLATSLLPENEPVPIASGE

SEQ ID NO: 11690 - protein, 157 aa, Lactococcus lactis subsp. cremoris
MNFYDFSAVKMNGETVSMSDYKGKVVIVVNTASKCGFTPQFEGLEKLYETYKDQGLEILGFPCNQFANQDAGENTEINEFCQLNYGVTFTMFQKIKVNGKEAHPLYQFLKKEAKGALSGTIKWNFTKFLIDRDGQVIERFAPKTEPEEMEEEIKKLL

SEQ ID NO: 11691 - protein, 173 aa, Helicobacter pylori
MNLEKLEVSHDASVLSVVIEISKHSNIKYELDKESGALMVDRVLYGAQNYPANYGFVPNTLGSDGDPVDALVLSDVAFQAGSVVKARLVGVLNMEDESGMDEKLIALPIDKIDPTHSYVKDIDDLSKHTLDKIKHFFETYKDLEPNKWVKVKGFENKENAIKVLEKAIKAYQG

SEQ ID NO: 11692 - protein, 380 aa, Glycine max
  unsure (1)..(380): unsure at all Xaa locations
MARVVALQQNQLSFSPLASSLFDFSGTRLQTQLQFKRKLCHPKGSFYVSASSTKKILIMGGTRFIGVFLSRLLVKEGHQVTLFTRGKAPVTQQLPGESDNDYADFSSKILHLKGDRKDFDFVKSSLSAEGFDVVYDINGREADEVEPILDALPNLEQFIYCSSAGVYLKSDLLPHAETDAVDPKSRHKGKLETESLLQARGVNWTSIRPVYIYGPLNYNPVEEWFFHRLKAGRPIPIPSSGLQITQLGHVKDLATAFIQVLGNEKAXSKEVFNISGEKYVTFDGLARACAKAXGGFPEPEIIHYNPKDFDFGKKKSFPFRDQHFFASIEKAKRVLGWEPEFGLVEGLADSYNLDFGRGTYRKEADFLTDDIILGKSLVSV

SEQ ID NO: 11693 - protein, 174 aa, Zea mays
MASLSVSSSSTIIDSRAPPSRLASASASSPSCISLPTLPIQSHTRAAKATAYCRKIVRNVVTRATTEVGEAPATTTEAETTELPEIVKTAQEAWEKVDDKYAIGSLAFASVVALWGSAGMISAIDRLPLVPGVLELVGIGYTGWFTYKNLVFKPDREALFEKVKSTYKDILGSS

SEQ ID NO: 11694 - protein, 166 aa, Sorghum bicolor
MGRIPCCEKDSVKRGPWTPEEDNKLLSYITQYGTRNWRLIPKNAGLQRCGKSCRLRWTNYLRPDLKHGEFTDAEEQTIIKLHSVVGNRWSVIAAQLPGRTDNDVKNHWNTKLKKKLFGMGIDPVTHKFFSHLMAEIRHHAGAAAGGAPRRGPRLVCFKGRNAPPSS

SEQ ID NO: 11695 - protein, 461 aa, Streptomyces coelicolor A3(2)
MTKEFDLAALLAERGAERYELHARHLNHQLPRMLHTIGFDKVYERAEGAHFWDADGNDYLDMLAGFAVMGLGRHHPVVRKALHDVLDASLADLTRFDCPPLPGLLAEKLLSYSPHLDRVFFGNSGTEAVETALKFARYATGRQRILYCPHAFHGLTAGSLSVNGEDGFRKGFAPLLPDTAVPLGDLDALARELKKGDVAALIVEPVQGKGVHEAPPGYLLAAQELLHRHKALLIADEVQTGLGRTGKFYAYQHSDGVEPDLVCVAKALSGGYVPVGATLGKDWIFQKVYSSMDRVQVHSASFGSNAQAMAAGLAVLSVMENEEIVANAAAVGERLKSRLAELVDRYELLADVRGRGLMIGIEFGRPRSLKLRSRWTMLQAARKGLFAQMVVVPLLQRHRILTQVSGDHLEVIKLIPPLIVDTDDADRFVDAFTEVMEDAHHGGGLMWDFGKTLVKQAVANR

SEQ ID NO: 11696 - protein, 657 aa, Trichodesmium erythraeum IMS101
MTKSTKSPTSPETWQMSDRERANLKKVTLYDSIQSLSEIWPRVAQYFGPITALHDPHAQPEVKLTYKELNEQIQKFAAGLQALEVVSKENGTSLPTRVALFADNSPRWMIADQGIITAGGADVVRSGTTDIEELIYILKDSGSISLVLENLALLERLSDRLQDLPIHLIILLSEEDANSYKSLPVVKFSQVIAKGEERPLQPTNQNLETLATLIYTSGTTGKPKGVMVTHGNLLYQINFLGTVVQPSPGEFTLSILPTWHSFGRTAEYLFLSQGCTQIYTNKRYLKKDLQEHKPHYLMSVPRIWELIYEGVQRQLREQPANKQKLARFFLDISERYIQACRVTQELVLELNSPSELEKLMATWQSWLLWPIHALGTKIVYQKIRQATGGRLKFAVSGGGSLGMHLENFFEIIGIDLLVGYGLTETSPVLTVRHYWENLRGSSGRPLPGTEIKIVNPETYETLGFGEKGLVLARGPQIMVGYYQNPEATKKAIDSEGWLNTGDIGWINPRNDLILTGRAKDTIVLTNGENIEPQPIENACTRSQYIDQIMLVGQDQKYLGALIVPNFEAVELWATQSQLSESQPKIDWKSQALQELFRQELNQEVKNRPGYRPDDRIGPFRLILDPFTIENGMMTQTMKIKRPVVTDHYRDLINEMFN

SEQ ID NO: 11697 - protein, 436 aa, Neurospora crassa
MVYVRQEKLPNLREYKYSAVDHSLTSKYILKPFYTNVVIKLFPMSMAPNLITLTGFMFVVGNFLTLLWYNPTLDQDCPPWVYYSWAAGLFLYQTFDAVDGTQARRTRQSGPLGELFDHGVDALNTSLECLIFAASQNMGQSWYTVATVFASLLTFYVQTWDEYHTKTLTLGIVNGPVEGILILVGVYTLTGYLGGASFWQQGMLSTLGVPQTLTFGTTALTLPSFLYNFSFTEWYMVQGTVVLVYNTVESARNVIRARRARGDRSRYALVGLLPFFATWALVVAYLFLQPNILHGHLVPFVLFAGIVNAYSVGKMITAHLVKLDFPYWNVMVIPLGLGVFDSLGPVIHKYAPDGLKNLGWPSALGDGVYQVAYMFCMLGMAVGVYGSFVVDVIVTICDYLDIWCLTIKYPYVEGQDDPKVSKQVVGSKGELKEKRG

SEQ ID NO: 11698 - protein, 177 aa, Zea mays
  unsure (1)..(177): unsure at all Xaa locations
MAAEGEKKMITLKSSDGEEFEVEEAVAMESQTIRHMIEDDCADNGIPLPNVNSKILSKVIEYCNKHVHAAAAAAAASKAGSDDVGAASANSTAASGEDLKNWDADFVKVDQGXTLFDLILAANYLNIKGLLDLTCQTVADMIKGKTPEEIRKTFNIKNDFTPEEEEEIRRENQWAFE

SEQ ID NO: 11699 - protein, 82 aa, Glycine max
FWIFRYREVESGRKEKKMSLVWLEAALPLGIIGGMLCIMGNSQYYIHKAYHGRPKHIGHDEWDVAMERRDKKVVEKASAPSS

SEQ ID NO: 11700 - protein, 280 aa, Chlamydomonas reinhardtii
MALAIRSSLRAAAMGRKAFRQAVPVRVAPAQRVRSVTTASAEITAYSVEEKGPKDSLEYRMFFKQGAKEVSCWHEIPLYAGDGHLHYICEIPKETSAKMEVATDEPRTPIKQDVKKGKLRFYPYNINWNYGMLPQTWEDPGHTDATLGAAGDNDPVDVVEIGAAAAKRGGVYKVKPVGVLAMIDDGELDWKVIAISADDPKAALCNDVEDVEKHFPGEIQKVLEWFRDYKIPDGKPANKFGYDNKCMNKEFTLNVIKETHEAYVKLKSGARANSEELSLI

SEQ ID NO: 11701 - protein, 520 aa, Kluyveromyces lactis
MFTRDANGRHKEVDALVDDMVNFSFDTDAKVMLDPPSTPTRIRGSPSPTRSIVKNPENSLMDIDDDTQGDLTADITKSPKKLPKDFYKKSSKTKSKRLVSVCQMYFLDYYCDMFDYVISRRERTRQVINYLEEQRRSNLMGTEQITNEWQGYLTKETNILRKRRLKPKHKDFEMITQVGQGGYGQVYLARKKDTKEICALKILNKKLLMKLEGTDHVLTERDILTTTRSEWLVKLLYAFQDPQSLYLAMEFVPGGDFRTLLLNTKFLQAPHARFYISEMFCAVNALHQLGYTHRDLKPENFLIDSKGHIKLTDFGLASGTVSMERIESMKIRLQEVKNLEFPEFRERSMDDRRRMYNKLREEEVRYAHSTVGSPDYMALEVLEAKNYDFTVDYWSLGCILFESLVGYTPFSGNSTNETYENLRNWKHVLQRPKCDNGRYAFSDRTWELITRLIADPINRLKSFEHVKRMRYFSEIDFNTLRTIHPPFIPQLDNEEDVGYFDDFTNEEHMARYVDVFKRQD

SEQ ID NO: 11702 - protein, 143 aa, Zea mays
MAMAYKMATEGMNVKEECQRWFMEMKWKKVHRFVVYKIDERSRAVLVDKVGGPGEGYNELVAALPGDDCRYAVFDFDFVTVDNCQKSKIFFIAWSPAASRIRAKILYATSKQGLRRLLDGVHYEVQATDPSEMGFDVIRGRAQ

SEQ ID NO: 11703 - protein, 372 aa, Oryza sativa
RWIRGRRRRRSCRRLEMPPVQPGRKCGGEERAGTSLLPETIKRWAELNNQQDDPQGPKKARNEPAKGSKKGCMKGKGGPENTRCDFRGVRQRTWGKWVAEIREPNRQSRLWLGTFPTAEAAACAYDEAARAMYGPMARTNFGQHHAPAASVQVPVAQAAVKCALPGGGLTASKSRTSTQGASADVQDVLTGGLSACESTTTTINNQSDVVSTLHKPEEVSEISSPRGAPPAVLEDGSNEDKAESVTYDENIVSQQRAPPEAEASNGRGEEVFEPLEPIASLPEDQGDYCFDIDEMLRMMEADPTNEGLWKGDKDGSDAILELGQDEPFYYEGVDPGMLDNLLRSDEPAWLLADPAMFISGGFEDDSQFFEGL

SEQ ID NO: 11704 - protein, 123 aa, Salvia columbariae
PEKPENVLVRDDGHIMLSDFDLSLRCAVSPTLVKTSSITSDPQNKNSTYCAQPACIEPACIQPSCVLPTMCFSPRLFSSKSKKDRKPKNDIGNQVSPLPDLIAEPTNARSMSFVGTHEYFAPE

SEQ ID NO: 11705 - protein, 204 aa, Glycine max
  unsure (1)..(204): unsure at all Xaa locations
ANLGDSNYSFGEAEALSDEMEEESQYVAEILRIKDVLLNPEDEATEIGKAVNPLRKHGSKDIRQLARTLINGWKEMVDEWVKATTTTAITGSEEGTPXSVNPSVVDDDEEEGLPSPPLDEGAFFVTQAGSMELSQFFDGMDDDGNPRPTGPFSKNHENGRKPAFDSHVLEMRKLQPSHDTVINRDVKSQQAKGKQGCCHACEAK

SEQ ID NO: 11706 - protein, 368 aa, Microbulbifer degradans 2-40
MRSTKALVSDGNGAFDVKQITVGEPAANEVRVKIKAAGLCHTDWDSIQNWNKPFIVGHEGAGIVDAVGEGVTKVAPGDKVILNWAIPCGQCQQCLTGYPHICEINSPVCGKGLCGHAHANATLYNNAPLERSFHLGTMAEYTVVKEAAVVKLETDISFSAASIVGCGVMTGWGSVVNAANVKAGSTVCVIGCGGVGLNVIQAARLSGAAKIIAIDINDERLAQAKQFGATHGVIANRADSHFDEVLTQVKQINNNRAADYAFECTAVPALGSAPLKLIRSAGTAVQVSGIEQRIDFDCELFEWDKIYINPLYGQCNPERDFPRILALYASGKLKLDELITKTYSLENITEGFDDLLNGRIAKGAIIFD

SEQ ID NO: 11707 - protein, 215 aa, Gossypium trilobum
VYYWECKGYTPLFPRILGHEASGIVESVGEGVNDLKPGDHVLPIFTGECKECRHCLSEETNNMCELLRINCDRGVMLADGKTRFSINGKPIYHFVGTSTFSQYTVVHVGQVAKISPTAPLDKVCPISCGICTGFGATVNVAKPKKGQTVAVFGLGAVGLAAAEGARVCGASRIIAVDVNPRRFEEAKRFGITEFVNPKDYDKPVQEVIVEMTGGG

SEQ ID NO: 11708 - protein, 253 aa, Streptomyces argillaceus
MDMGLTGRRVLVTGGSSGIGAAVARAYADEGARVALTYRGGDEAAERLARELGAGRHAAMAVRYSLGEPDTVESAVATVTERWGGVDVLVANAVRWAPRRAPGTRFEEVASGDWRGFLDDNLAPTLRTVQLVVAGMRARSWGRIVLISSHVALDGHRGQEFYGAAKSALHGFARSLAWDVGRDGVLVNVVCPGLTTTERVLTGLPDEIRERELGSTPTGRLSSPEDIAGAVLFLGSAANANTTGQTLTVSGGR

SEQ ID NO: 11709 - protein, 392 aa, Stigmaphyllon puberum
DLEPVNPVDVPVTAAGALKSYKLAAKAISRLQSLPSGNISLLCDVLVKEVRDLTGYDRVVVYKFHEDEHGEVVSECRISDLESYLGLHYPATDIPQASRFLFMKNKVRMICDCLAPPVKVIQDERLPQPLSFCGSTLRSPHGCHAQYMTNMGTIASLVMSVTINEDDDTMDGDQQQMTRKLWGLVVCHHNSPQFVPFPLRYACEFLIQVFGVQINKEVELAAQVREKHILQIQTMLCDMLLRDAPVAIITQSPNVMDLVKCDGAALYFKNKIWLLGVTPSKEQIRDIAQWLLEYHSGNTGLSTDSLMEAGYPGASALGDAVCGMAAVSITSRDFLFWFRSHTAKAVKWGGAKHDPDDKDDLRKMHPRSSFKAFLEVVKWRSMPWEDVEMDAI

SEQ ID NO: 11710 - protein, 152 aa, Zea mays; identical to SEQ ID NO: 631

SEQ ID NO: 11711 - protein, 421 aa, Microbulbifer degradans 2-40
MCWIASMAWWPQYLFSLLPISRPAGAYKSMQQICVLGSTGSIGISTLDVLASHPDKFSVYALTANSSIDLLVEQCLKFSPQYAVIRDEALYLPLKQRIESLNCTTEVLAGEQALCDVASAVQVDSVMAAIVGAAGLAPTLAAVEAGKRVLLANKESLVMSGKLFMQAAKAASALVLPIDSEHNAIFQCLPQPYTSLADAGVQKILLTGSGGPFRDTPLADLSAKTPDQACAHPNWSMGRKISVDSATMMNKGLEFIEACWLFDATPEQIEIVVHPQSIIHSMVQYVDGSVLAQMGNPDMRTPIAHCLDWPRRIDSGVASLDFFALQGLDFCRPDYQRFPALALATSAIKSGGTYPVALNAANEVAVALFLEEKIKFTDIAAIIAAVLEDWETCEPDTIAAVKEADAIARKLAYSVAAKFGY

SEQ ID NO: 11712 - protein, 325 aa, Glycine max
MGGWAIAVHGGAGVDPNLPLERQEEAKQLLTRCLNLGISALNSNLPAIDVVELVVRELETDPLFNSGRGSALTEKGTVEMEASIMDGPKRRCGAVSGLTTVKNPISLARLVMDKSPHSYLAFSGAEEFARQQGVEVVDNEYFITPDNVGMLKLAKEANTILFDYRIPTSGYETCGSGVESPLQMNGLPISVYAPETVGCVVVDREGRCAAATSTGGLMNKMTGRIGDSPLIGAGTYACDVCGVSCTGEGEAIIRWLAREVAAVMEYKGLKLQEAVDFVIKHRLDEGMAGLIAVSNAGEVAYGFNCNGMFRGCATENGFMEVGIWE

SEQ ID NO: 11713 - protein, 479 aa, Shigella flexneri 2a str. 301
MISGRHDRKPYYAGEAAIMAINSPLNIAAQPGKTRLRKSLKLWQVVMMGLAYLTPMTVFDTFGIVSGISDGHVPASYLLALAGVLFTAISYGKLVRQFPEAGSAYTYAQKSINPHVGFMVGWSSLLDYLFLPMINVLLAKIYLSALFPEVPPWVWVVTFVAILTAANLKSVNLVANFNTLFVLVQISIMVVFIFLVVQGLHKGEGVGTVWSLQPFISENAHLIPIITGATIVCFSFLGFDAVTTLSEETPDAARVIPKAIFLTAVYGGVIFIAASFFMQLFFPDISRFKDPDAALPEIALYVGGKLFQSIFLCTTFVNTLASGLASHASVSRLLYVMGRDNVFPERVFGYVHPKWRTPALNVIMVGIVALSALFFDLVTATALINFGALVAFTFVNLSVFNHFWRRKGMNKSWKDHFHYLLMPLVGALTVGVLWVNLESTSLTLGLVWASLGGAYLWYLIRRYRKVPLYEGDRTPVSET

SEQ ID NO: 11714 - protein, 250 aa, Fragaria x ananassa
MGKCYPTVSEEYKKAIDKAKRKLRGLIAEKNCAPLMLRLAWHSAGTYDVKTKTGGPFGTMKQSAELAHGANNGLDIAVRLLEPIKEQFPILSYADFYQLAGVVAVEVTGGPDVPFHPGREDKPEPPPEGRLPDAGKGSDHLREVFGKTMGLSDQDIVALSGGHTLGRAHKERSGFEGPWTPNPLIFDNSYFTVLLSGEKEGLLQLPTDKALLSDPVFRPLVEKYAADEDAFFSDYALAHQRLSELGFAEA

SEQ ID NO: 11715 - protein, 361 aa, Arabis flagellosa
CKAAVAWEAGKPLVMEEVEVAPPQKHEVRIKILFTSLCHTDVYFWEAKGQTPWFPRIFGHEAGGIVESIGEGVTDLAPGDHVLPIFTGECGDCPHCHSEESNMCDLLRINTERGGMIHDGESRFSINGKPIHHFVGTSTFSEYTVVHSGQVAKINPDAPLDKVCIVSCGLSTGLGATLNVAKPKKGQSVAIFGLGAVGLAAAEGARIAGASRIIGVDLNSKRFDEAKKFGVTEFVNPKDHDKPVQQVIAEMTDGGVDRSVECTGSVQAMIQAFECVHDGWGVAVLVGVPSKDDAFKTHPMNFLNERTLKGTFFGNYKPKTDIPGVVEKYMNKELELEKFITHTVPFSEINKAFDYMLKGES

SEQ ID NO: 11716 - protein, 410 aa, Aeropyrum pernix
MEAGSIVLGLVGKTNVGKSTFFAAATEVPVKIENRPFVTIEPNVGVGYARKRCAHVELGLPRCDPVNSLCIEGWRFIPVKLLDVAGLVPGAHRGRGLGNRFLDDVRKADALLLVVDASGSTDPEGVPVKPGSYDPVEEVGLMLGEIYEWMLQNLARDWERFARRVDTAGNVDLVTALSQRLSGFEIPRGVVAGVLEETGLGEKRLSSWSREDLRLFVKLVLERGKPAVILANKVDVPGAEENVERLGSSYPGIPVVPASALAELMLRRLAREGRVRYIPGDPDFTVKDPGGLGGKALKALELVRERVMKRWGGTGVVQAINTAVFDVLDMIAVYPVEDPNRYTDREGRILPDVILVKRGSTPRDLAYRIHTDLGKTFLYAVNAKTKQRVGEGYRLQDGDVVKIVAAAGKR

SEQ ID NO: 11717 - protein, 415 aa, Colwellia maris
MTNKIIIPTTGDKITFIDGKLSVPNNPIIPYIEGDGIGVDVTPPMLKVVNAAVAKAYGGDRKIEWLEVYAGEKATKMYDSETWLPEETLNILQEYKVSIKGPLTTPVGGGMSSLNVAIRQMLDLYVCQRPVQWFTGVPSPVKRPSEVDMVIFRENTEDIYAGIEYKAGSDKAKSVIKFLIEEMGASNIRFTENCGIGIKPVSKEGSQRLVRQAIQYAIDNNKDSVTLVHKGNIMKFTEGAFKDWGYELAIEEFGASLLHGGPWCSLKNPNTGKEIIIKDVIADAMLQQVLLRPAEYSVIATLNLNGDYLSDALAAQVGGIGIAPGANLGDEVAVFEATHGTAPKYAGKNKVNPGSVILSAEMMLRHMGWLEADLLLKGMSGAIQAKTVTYDFERLMDDATLVSCSAFGDCIIDHM

SEQ ID NO: 11718 - protein, 346 aa, Klebsiella oxytoca
MQSVVIHAEGTVRVEERPIPTLQTENDVLVKVVSSGLCGSDIPRTFAKGAHYYPITLGHEFSGYVESYGSAVTDLQPGDGVACVPLLPCLICPDWLKGFYSQWAKYEFVGSRGDGAFTEYIVVNRKNVFVCADRMPIDDGALIEPMTVGLHAFHLAQAAKENVIIIGAGTMGLLALQCARELGAKSITAIDINPQRLALAKTLGATYVFNSKEMSSKEIQTALEEIQFDQLVLETAGTPQTVALGIEVAGPRAQLALVGTLHHDLTLLSATFGQILRKELTIVGSWMNYSGPWPGEEWQTAVRLLTEKRIQLVPLIAHIGNAESFAREVQALNGAPMQGKILLKLS

SEQ ID NO: 11719 - protein, 213 aa, Candida maltosa
DQSLNILLAGRDTTAGLLSFAVFELGRNPEVWSKLRQEIGDKFGLDSDSRIEDISFELLKLCEYLKAVINETLRLYPSVPRNGRFAAADTTLPHGGGKDGMSPILVRKGQTVMYSVYALQRDEKYYGKDANEFRPERWFEPEVRKLGWAFLPFNGGPRICLGQQFALTEASYVLVRLIQSFETLELSPEAAYPPAKLTHLTMCLFDGAPVRIE

SEQ ID NO: 11720 - protein, 205 aa, Tetraselmis chui
EGFEHYRCDRSLSMGLNLGNMAKMLKCAGNDDVITIKADDKPDSLTFMMESPSQDRVSDFELKLMDIDSEHLGIPETEHQAVVKLPASEFQRICRDLSSIGDTVNISVTKDGVRFSTKGDIGSANISCRQNTSVDKPEEAVVIEMQEPVTLTFALRYLNSFAKATPLSSTVTLSMSKELPIVVEYRIQDMGFVKFYLAPKIEEDE

SEQ ID NO: 11721 - protein, 73 aa, SINNINGIA KAUTSKYI
  unsure (1)..(73): unsure at all Xaa locations
ISGTNGEVMPGQWEFQVGPSVGIEAGDHIWCARYLLERITEQAGVXLSLDPKPIXGDWNGAGCHTNYSTKSMR

SEQ ID NO: 11722 - protein, 487 aa, Triticum aestivum
  unsure (1)..(487): unsure at all Xaa locations
MDYLLKVVALVVTASVIGIHLLTRARKWGPANLPPGSLGLPXLGQTLSVFRAARASAGNQWIQDRIKRYGPVSKASVFCTPTVFLTGPAANKFMFFSSGLRMRTHRSXSVLPGRKSIVDMHGQDHRRIRGALMEFLKPDMLRRYTGRIDAKVRRHLEEHWYGHPTVXLLPLMRALTFDITSSLLFGLETGAXRDAFTSDFWAHXRVFLPSPMNLPFTTFSRSLKAGRRARRLLEVITSDKKAKLGQGKASPNSDLITRLLSMTDEHGEQLLTNEEILDNGMFALVASHDTTSILMTCMVGHLANDPATLAAMVQEHEEIARNKAEGEALTWEDLSKMKFTWQVAQETLRIDPPIFGNFRTALEDIEFDGYHIPKGWQVIWTAIATHMDPSIFHEPAKFDPSRFQSQSSVTPPCSFVPFGRRPQNIPLGWSFPKMETLVMMHXLVRHFRWKLCCKEKTFVRVSFPSPLQGLPIELEHINPGDRPGFAK

SEQ ID NO: 11723 - protein, 376 aa, Escherichia coli K12
MLQRGCDGCKQNQSREPATIDGFMPKAQESIMGQQKQRNRRWVLASRPHGAPVPENFRLEEDDVATPGEGQVLLRTVYLSLDPYMRGRMSDEPSYSPPVDIGGVMVGGTVSRVVESNHPDYQSGDWVLGYSGWQDYDISSGDDLVKLGDHPQNPSWSLGVLGMPGFTAYMGLLDIGQPKEGETLVVAAATGPVGATVGQIGKLKGCRVVGVAGGAEKCRHATEVLGFDVCLDHHADDFAEQLAKACPKGIDIYYENVGGKVFDAVLPLLNTSARIPVCGLVSSYNATELPPGPDRLPLLMATVLKKRIRLQGFIIAQDYGHRIHEFQREMGQWVKEDKIHYREEITDGLENAPQTFIGLLKGKNFGKVVIRVAGDD

SEQ ID NO: 11724 - protein, 238 aa, Zea mays
  unsure (1)..(238): unsure at all Xaa locations
NFEEKDGVKLPSYRGDNVNGDAFDLKSRTPDPDRMIRAYAQSVATLNLFRAFATGGYAAMQRVIQWNLDFMDHNEQGDRYRELAHRVDEALGFMTAAGLGMDHPIMTTTDFWTSHECLLLPYEQALTREDSTSGLFYDCSAHMVWVGERTRQLDGAHVEFLRGIANPLGIKVSDKMNPAELVKLIDILNPSNKPGRITIITRMXAENMRVKVPHLIRAVRNSXTDVTWITRPMHXTPS

SEQ ID NO: 11725 - protein, 348 aa, Chloroflexus aurantiacus
MRAVYYEAFGQMPWIATLPDPAPTPDGVVLAVRATGLCRSDWHGWMGHDPDIKLPHVPGHELAGEIVAVGSQVRRWRIGDRVTVPFVCACGFCPQCQAGQQQVCDNQFQPGFTHWGSFAEYVAIDRADLNLVRLPADMSFTTAASLGCRFATAFRAVVDLGQVRGGEWVAVYGCGGVGLSAIMLASALGGQVIGIDINLERLALARAVGATAVIDATTEPDVVSVVRDLSRGGVHLAIDALGSPMTCANAIASLRKRGRHVQVGLLLADQRMPPLPMDIVVARELTIMGSHGMQAYRYDAMLDLIQSGKVQPQRLIGRTISLSEAPAALVDLDSFRGSGVTVITEFQG

SEQ ID NO: 11726 - protein, 513 aa, Hordeum vulgare
MDGNNRGGGHSEVLKNYNLGKTLGLGTFGDVKVAERNVTGQRVAIKILNRRKMETMEMEEKGNREIKIMRLFIDFIHPHIIRVYEVIETPKDIFVVMEYCNNGELLDYIIENGRLQEDEARRIFQQILAGVEYCHRIMVVHRDLKPENLLLDSRYNVKLADFGLSNVMRDGHFLKTSCGSLNYAAPEIISSKLYAGPEVDVWSCGVVLYALLCGSVPFDDDNIPSLFRKIKGGTYILPSYLSDSARDLIPKLLNIDPMKRITFHEIRVHPWFKNHLPCYLAVPPPYKEQQAKMIDEDILREVVNLGYDKDHVCESLWNRLQNEETVAYYLLLDDRFRSTSGYLGADHQHLMDRSFNEFTLSESASPSTRNYLPGINDSQGGGLRPYYPVQRKWAIGLQSGAHPRDIMIEVLKALKELNVCWKKNGLYNMKCRWCPGFPQVSDMLLDSNHNFVDDSTIMDNGNADGRLPAVVKFEIQLYKTKDNKYLLDIQRVTGPQLLFLEFCGAFLTNLRVL

SEQ ID NO: 11727 - protein, 328 aa, Brucella melitensis
MTILVTGGAGYIGSHTCVQLIEAGHEVVVVDNFDNSHPEALHRIEKITGPGDIAIVALMEQMIKRHKCTAVIHFAGLKAVGESSEKPLLYYDCNVLGTLRLLQAMEVTGVKKLVFSSSATVYGVPGKLPITEDQPLSATNPYGRTKLVIEDMLRDLYNSDNSWAVAILRYFNPVGAHESGLIGEDPNDSQQSDAIIAQVATGQTVKLNIWGNDYPTPDGTGVRDYIHVNDLAAGHLKALKKLDKPSASSVNLGTGQGYSVLDVIKAFEHVSNREIKYEIAPRRPGMLPECYADPGFAKKFLGWSAEKNLREMCQDMWNWQSKNPTAYE

SEQ ID NO: 11728 - protein, 93 aa, Zea mays; identical to SEQ ID NO: 4873

SEQ ID NO: 11729 - protein, 141 aa, Glycine max
MAKVGKLTKLKSAIKRWPSLTRLSRNSSSVSSNKGVSGKGTSLNSSKEHEHEQEQLRAVYVGKSRRRYLVNSEVIDHPVFQELVDRSCSSNSSSSHHHDDDGVVVVSCEVVLFEHLLWMLESEETKLGSMDELVEFYSCAC

SEQ ID NO: 11730 - protein, 365 aa, Mycoplasma penetrans
MSLSTGIVGLPNVGKSTLFNAITNSSVEAANYPFATIEPNVGIVNVPDVRLTNLANLINPEKVVYNTFKFVDIAGLVKGASKGEGLGNKFLSNIREVDAICHVIRCFENTDITHVNSSVDPIRDLEIINLELIFSDIEVINNRLGRIGKKAQSRCKDSAFEKEVCEKILAALTNEKLANTVELNDKEKLVIKSYSLLTIKPIIYVANVSENDLNNLDANIHYKNLENKVGKENIIPLAIKLEQELSKIENYEEKKEFLKMMNLTEIGLDKLILKAYQILDLMTYFTYGKKEVRAWEFKKGMTAPECAGIIHSDFQRGFIKAEIIKYDDLMEYKSEDEVKKQGKMKLAGKDYIVEDGDICTFKFNV

SEQ ID NO: 11731 - protein, 665 aa, Clostridium acetobutylicum
MNKNLKRNLAVLVSSTFLVSTTINLTSSKPIKAENARKPVYLNPNANTEARVSDLLKRMTLDEKVGQMLQGELGTSSDNAKPEDCINYTLGSVLSGGNADPTTGNDAQSWYDTVTSFVEASTQNRLHIPILYGVDAVHGNSNIIGATIFPHNIALGAIATGNLNEGKKIVRKIGSATAKEMRVTDIPWTFAPCLANPQNPTWGRTYEGFGEDINLASELGSSYIKGLQGNDINDLKKPNKAVATIKHYLGEGYTENGTNQGNVTSMTKEQVAKNLIKPYEDAVRAGARTVMPSYNSIQGVKMTASKYLLTDILKNKLKFDGFVISDYNAAQQITADENGNSVSGLKNQVKVSINAGVDMLMEPNDWKSCIGYIKELVADEKAHPGTGIPMSRINDAVSRILRVKFQSGLFEHPISNNPENNPKVMAQLGSNKHRKLAREAVSKSLVLLKNDAVGGKPILSQLKKMKKIFVAGKSANDIGNQCGGWTIDWQGKSGNTTKGTTILQGIKDSISPKQNVTFSEDGAGASGNDVAIAIIGETPYAETNGDNLNGLNLDSTDKKTLANLKASGVPTIVVLVSGRPMIVTDYIKDWAGLVEAWLPGTEGNGVSDVLFGNKDFTGRLPEKWAFYTEAYPITNSNKQYMLFDSGYGLTKNQVTPRLPITPAHP

SEQ ID NO: 11732 - protein, 400 aa, Pseudomonas syringae pv. tomato str. DC3000
MTTACLMSTYQPLALSFTRGLGTRLWDQSGREYLDAVAGVAVTNVGHSHPMLVDAIRDQAGLLLHTSNLYSIDWQQRLAQKLTRLAGMDRVFFNNSGAEANETALKLARLHGWHKYIEQPLVVVMENAFHGRTLGTLAASDGPAVRLSYSDLPGDYIKVPFGDLLAFDKVCVTHGHRIAAVLVEPIQGEGGAQVAPAGYLKALRERCTRRDWLLMLDEIQTGMGRTGKWFAFQHEGIVPDVMTLAKGLGNGVPIGACLARGKAAELFTPGSHGSTFGGNPLACRVGCTVIDIIEQQALVENAGVRGQHLLGRLQEVLGGHPQVMQVRGRGLMIGIELREAIPELTRIAAEQHGLLINVTRGKVIRLLPPLVLEAAEVEQIVQGLAASLDSASYRALERSA

SEQ ID NO: 11733 - protein, 404 aa, Glycine max
  unsure (1)..(404): unsure at all Xaa locations
MATLFQGLGVVNPSLASSNSNKFHLPSRTSLSERKDGIFVVRSDATRVSSQVLKAGARKHELLVTNAVATKEGRPAASTSKSGHXLLLFEALREGLEEEMERESLCIVSWDEDVGHYGMILRGDKRLLPTKFGNLRVLDTPIVATXFTGHGHLGLQLTSLRRCXSASKMVFLLLVFNQFSNIFGKPDDICVEDFISLYHYAISSRGPKVVGLTXNCMHCQHISSSVNKLGAVTKRRCHLWLKHCLASSQFAVYQSHFDKIVDGKYGSIXSSQSTQIPYPGDSVPLIXWKVSRYLPCTLLLWEPLFKPNANLVIVIKYLKPFGFHTILNSXEKTHRVLIAEECMRTGGIGASLTAAITENFHDYLDAPIVCLSSQDVPTPYAGTLEEWTVVQPAQIVTAVEQLCK

SEQ ID NO: 11734 - protein, 236 aa, Oryza sativa
DRNDPTKPRALSGLSPYLHFGHISAQRCALEAKKCRHLSPKSVDAFLEELVVRRELADNFCYYQPQYDSLSGAWEWARKTLMDHAADKREHIYTREQLENAKTHDPLWNASQLEMVHHGKMHGFMRMYWAKKILEWTSGPEEALSTAIYLNDKYEIDGRDPSGYVGCMWSICGLHDQGWKERPVFGKIRYMNYAGCKRKFDVDAYISYVKRLAGQSKKRNAEESPNPVVKLSKSQP

SEQ ID NO: 11735 - protein, 306 aa, Washingtonia robusta
  unsure (1)..(306): unsure at all Xaa locations
IVESVGEGGXDLSPGDHVLPVFTGECKECAHCKREESNMCDLLRIDTERGVMISDGQSRFSINGKPIYHFVGTSTFSEYTVIHSGCVAKINPLAPLDKVCVLSCGISTGLGATLNVAKPPMGSTVAIFGLGAVGLAAAEGARIAGASRIIGVDRNPARFDEAKNFGITEFVNPKDYDRPVQEVLAEMTGGGVDRSIECTGNINAMISAFECVHDGWGVAVLVGVPHKEAEFKTHPINFLNERTLKGTFFGNYKPRTDLPLVVEKYMNKELELEKFITHSVPFSEINKAFDYMLKGDGLRXIIHMDG

SEQ ID NO: 11736 - protein, 379 aa, Arabis jacquinii
MITTGQIFRCKAAVAWEAGKPLVMEEVEVAPPQKHEVRIKILFTSLCHTDVYFWEAKGQTPLFPRIFGHEAGGIVESIGEGVTDLAPGDHVLPIFTGECGDCPHCHSEESNMCDLLRINTERGGMIHDGESRFSINGKPIHHFVGTSTFFEYTVVHSGQVAKIIPDAPLDKVCIVSCGLSTGLEATLNVAKPKKGQSVAIFGLGAVGLAAAEGARIAGASRIIGVDLNSKRFDEAKKFGVTEFVDPKDHDKPVQQVIAEMTDGGVDRSVECTGSVQAMIQAFECVHDGWGVAVLVGVPSKGDAFKTHPMNFLNERTLKGTFFGNYKPKTDIPGVVEKYMNKELELEKFITHTVPLSEINKAFDYMMKGESIRCIITMGA

SEQ ID NO: 11737 - protein, 364 aa, Pichia anomala
MSEKTIVVLPGDHVGTEITNEAIKVLKAIEEVRPNVKFNFQHHLIGGAAIDATGVPLPDEALEAAKKADAVLLGAVGGPKWGTGAVRPEQGLLKIRKELNLYANLRPCNFASESLLELSPIKAEFAKGTDFTVVRELVGGIYFGERKEDDGSGVASDTETYSVPEVQRITRMAAFMALQHNPPLPIWSLDKANVLASSRLWRKTVTETIEKEFPQLTVQHQLIDSAAMILIKSPTTLNGIVITSNMFGDIISDEASVIPGSLGLLPSASLASLPDTNKAFGLYEPCHGSAPDLPANKVNPIATILSAAMMLKLSLDLFEEGVALEKAVKEVLDAGVRTGDLRGSNSTKEVGDAAVEAAKRILKN

SEQ ID NO: 11738 - protein, 1129 aa, Avena sativa
MSSSRPASSSSSRNRQSSQARVLAQTTLDAELNAEYEESGDSFDYSKLVEAQRDGPPVQQGRSEKVIAYLQHIQKGKLIQTFGCLLALDEKSFNVIAFSENAPEMLTTVSHAVPSVDDPPRLGIGTNVRSLFSDQGATALHKALGFADVSLLNPILVQCKTSGKPFYAIVHRATGCLVVDFEPVKPTEFPATAAGALQSYKLAAKAISKIQSLPGGSMEVLCNTVVKEVFDLTGYDRVMAYKFHEDDHGEVFSEITKPGLEPYLGLHYPATDIPQAARFLFMKNKVRMICDCRARSIKVIEAEALPFDISLCGSALRAPHSCHLQYMENMNSIASLVMAVVVNENEEDDEAESEQPAQQQKKKKLWGLLVCHHESPRYVPFPLRYACEFLAQVFAVHVNREFELEKQLREKNILKMQTMLSDMLFREASPLTIVSGTPNIMDLVKCDGAALLYGGKVWRLRNAPTESQIHDIAFWLSDVHRDSTGLSTDSLHDAGYPGAAALGDMICGMAVAKINSKDILFWFRSHTAAEIRWGGAKNDPSDMDDSRRMHPRLSFKAFLEVVKMKSLPWSDYEMDAIHSLQLILRGTLNDASKPKREASLDNQIGDLKLDGLAELQAVTSEMVRLMETATVPILAVDGNGLVNGWNQKAAELTGLRVDDAIGRHILTLVEDSSVPVVQRMLYLALQGKEEKEVRFEVKTHGPKRDDGPVILVVNACASRDLHDHVVGVCFVAQDMTVHKLVMDKFTRVEGDYKAIIHNPNPLIPPIFGADEFGWCSEWNAAMTKLTGWNRDEVLDKMLLGEVFDSSNASCPLKNRDAFVSLCVLINSALAGEETEKAPFGFFDRSGKYIECLLSANRKENEGGLITGVFCFIHVASHELQHALQVQQASEQTSLKRLKAFSYMRHAINNPLSGMLYSRKALKNTDLNEEQMKQIHVGDNCHHQINKILADLDQDSITEKSSCLDLEMAEFLLQDVVVAAVSQVLITCQGKGIRISCNLPERFMKQSVYGDGVRLQQILSDFLFISVKFSPVGGSVEISSKLTKNSIGENLHLIDLELRIKHQGLGVPAELMAQMFEEDNKEQSEEGLSLLVSRNLLRLMNGDVRHLREAGVSTFIITAELASAPTAMGQ

SEQ ID NO: 11739 - protein, 202 aa, Zea mays
  unsure (1)..(202): unsure at all Xaa locations
KQVLPRAVGRSIGLMFTGKDMQPPRCRXRYLKFIILXNSIQRHSLHIKLWLLALYYVTGKESFLVTPLSGFHGCLAGFLVALKQLLPNLELPMGFLWENKGQRGVPFFGVCFSXIMAFMVPDSINFLPPLVSGMYVSWLSLRYFQRNPLAGLKGDPSDDFSFPSLFPAPIRERGERVFEERLAADNAGDPEASPRGHGPAED

SEQ ID NO: 11740 - protein, 202 aa, Desulfitobacterium hafniense
SPLVNVVFLSTALIIAVFWISGITVSQYQDTKAILTYLLGPATVALAIPLYRSREVLRKNILPVVGGIVVGTTVNIVTTVLVAEWLGLDKLIVTSLVPKSVTVPIAVSVSGILSGDPTLTSVFVIATGIIGSFMTPVLLNLFKVTNPLVRGLAYGTTAHGQGTASALAEGTLQGSMSGVAMGIAAIYMSVAAPFLVHNLLSL

SEQ ID NO: 11741 - protein, 358 aa, Vicia sativa
MDRRFIFALFLFAATATAATDDFLIRQVVDNEEDHLLNAEHHFTSFKSKFSKSYATKEEHDYRFGVFKANLIKAKLHQKLDPTAEHGITKFSDLTASEFRRQFLGLNKRLRLPAHAQKAPILPTTNLPEDFDWREKGAVTPVKDQGSCGSCWAFSTTGALEGAHYLATGKLVSLSEQQLVDCDHVCDPEEAGSCDSGCNGGLMNNAFEYLLQSGGVVQEKDYAYTGRDGSCKFDKSKVVASVSNFSVVSLDEEQIAANLVKNGPLAVAINAAWMQAYMSGVSCPYVCAKARLDHGVLLVGFGKGAYAPIRLKEKPYWIIKNSWGQNWGEQGYYKICRGRNVCGVDSMVSTVAAAQSNN

SEQ ID NO: 11742 - protein, 153 aa, Aspergillus flavus
VKAVAVLRGDSKISGTVTFEQADANAPTTVSWNITGHDANAERAFHVHQFGDNTNGCTSAGPHFNPFGKEHGAPEDENRHVGDLGNFKTDAEGNAVGSKQDKLIKLIGAESVLGRTLVIHAGTDDLGRSEHPESKKTGNAGARPACGVIGIAA

SEQ ID NO: 11743 - protein, 466 aa, Sinorhizobium meliloti
MDTRPEPFEPPAPVPRTGIPSRLEIIRTVLRNPLELWGEPSYTLPWIETKFINQRTLIVNDPGLIRYILVENAANYEMSNVRRLILRPILRDGLLTAEGEVWKRSRKAMAPVFTPRHAQGFAGQMLRVCEAFVDRYAGASSEPFVTNVAVDMTELTFEILAETLFSGEIAVEKQGFAANVEELLHRMGRVDPMDLLVAPSWVPRLTRIGGRKVLDRFRGVVSETMSLRRRRTTEAPGDVPNDFLTLLLQLEGPDGLSTSEIEDNILTFIGAGHETTARALAWCFYCVANTPAYRETMEQEIDSVLASGADPVDWLGRMPHVLAAFEEALRLYPPAPSINRAAIEEDAWTSPEGERVPIRKGISVLVMPWTLHRHALYWQKPRAFMPERFLPENRDKINRFQYLPFGAGPRVCIGATFALQEAVIALAVLMHRFRFDLTDETHPWPVQRLTTQPRGGLPMKVSARVK

SEQ ID NO: 11744 - protein, 392 aa, Oryza sativa (japonica cultivar-group)
MVLSNPAMLPPGFRFHPTDEELIVHYLRNRAASSPCPVSIIADVDIYKFDPWDLPSKENYGDREWYFFSPRDRKYPNGIRPNRAAGSGYWKATGTDKPIHSSGGAATNESVGVKKALVFYKGRPPKGTKTNWIMHEYRLAAADAHAANTYRPMKFRNTSMRLDDWVLCRIYKKSSHASPLAVPPLSDHEQDEPCALEENAPLYAPSSSSAASMILQGAAAGAFPSLHAAAAATQRTAMQKIPSISDLLNEYSLSQLFDDGGAAAAAPLQEMARQPDHHHHQQQQHALFGHPVMNHFIANNSMVQLAHLDPSSSAAASTSAGAVVEPPAVTGKRKRSSDGGEPTIQALPPAAAAAKKPNGSCVGATFQIGSALQGSSLGLSHQMLLHSNMGMN

SEQ ID NO: 11745 - protein, 288 aa, Zea mays
  unsure (1)..(288): unsure at all Xaa locations
PFPQPRRVASYDPKLSLLRRSQPWPKNYPTVSAEYSEAVREGQAASLRALIAEKSCAPLMLRLAWHSAGTFDVSSRTGGPFGTMKHQSELAHGANAGLDXIAVRLLEPIKEEFXILSYADFYQLAGVVAVEVTGGPEIPFHPGREDKPQPPPEGRLPDATKGXSDHLRQVFGKQMGLXSDQDIVALSGGHTLGXCHKERSGFXRGPWTTNPFGSFDNSYFXKELSEWVIKEGXLLQLPSDKALLSDPVFPPSCREICWADEKAFFDDYKEAHLKLSRTGVSNHWLHNV

SEQ ID NO: 11746 - protein, 345 aa, Pseudomonas syringae pv. tomato str. DC3000
MTYIAAENRYKDMPYRRTGRSGLVLPALSLGLWHNFGDSTPIDTQRAMLRTAFDLGINHFDLANNYGPPYGSAEINFGRLLREDFKRYRDELIISSKAGWDMWPGPYGQGGGSRKYVLASLDQSLQRMGLDYVDIFYSHRFDPDTPLEETASALATAVQQGKALYIGISSYSGAKTREIAALLKEWKVPLLIHQPAYNLLNRWVEKDLLDATEELGAGVIAFTALAQGLLSDKYLNGVPKDARVNRPGGGSLQASHLSEQNIAHVRALNEIAQRRGQSLAQMALAWTLRDPRVTSALIGASRPEQIIENVGALQNLAFSSEELAEIDSFAVEGGINLWEKPSLAE

SEQ ID NO: 11747 - protein, 277 aa, Oryza sativa (indica cultivar-group)
MKRPGGAGGGGGSPSLVTMANSSDDGYGGVGMEAEGDVEEEMMACGGGGEKKRRLSVEQVRALERSFEVENKLEPERKARLARDLGLQPRQVAVWFQNRRARWKTKQLERDYAALRHSYDSLRLDHDALRRDKDALLAEIKELKAKLGDEEAAASFTSVKEEPAASDGPPAAGFGSSDSDSSAVLNDVDAAGAAPAATDALAPEACTFLGAPPAAGAGAGAAAAASHEEVFFHGNFLKVEEDETGFLDDDEPCGGFFADDQPPPLSSWWAEPTEHWN

SEQ ID NO: 11748 - protein, 113 aa, Zea luxurians
MGRRACCAKEGVKRGAWTSKEDDALAAYVKAHGEGKWREVPQKAGLRRCGKSCRLRWLNYLRPNIRRGNISYDEEDLIIRLHRILGNRWSLIAGRLPGRTDNEIKNYWNSTLV

SEQ ID NO: 11749 - protein, 246 aa, Pseudomonas putida
MTKRIAYVTGGMGGIGTSICQRLHKDGYTVVAGCGPNSPRRVKWLEEQKANGYDFIASEGNVGDWESTKNAFDKVKAEVGEVDILVNNAGITRDVVFRKMTHEDWTAVIDTNLTSLFNVTKQVVDGMVERGFGRIINISSVNGQKGQFGQTNYSTAKAGIHGFTMALAQEVATKGVTVNTVSPGYIGTDMVKAIRPEVLEKIVATIPVRRLGRPDEIGSIVSWLASEESGFSTGADFSLNGGLHMG

SEQ ID NO: 11750 - protein, 291 aa, Clostridium thermocellum ATCC 27405
MNIQWFPGHMAKTRRILAENLKMVDVVVELLDARIPASSKNPEIDGIVKNKPKIVVLNKADLADEKISNEWSKWYNSQGYATIFIDSIKGTGIKQLKDQMRDIMKDRIERDRQRGRIFRPIRTMIVGIPNVGKSSLINKIAGKKSAVTGDRPGVTRNKQWINVNNEIQLMDTPGILWPKFEDKTVGINLAVTGAIKDEIIDTVELASILLEHLSKTYPENIKKRYKLESLQDKKGYELLEEAGKKRGCIISGGEVDLTRIAAIVLDEFRGGKIGRITLERPGDAVQELVAD

SEQ ID NO: 11751 - protein, 343 aa, Vibrio cholerae
MKIKALSKLKPEQGIWMNEVDMPELGHNDLLIKIKKTAICGTDVHIYNWDEWSQKTIPVPMVVGHEYVGEVVGIGQEVRGFQIGDRVSGEGHITCGHCRNCRGGRTHLCRNTIGVGVNRTGCFSEYLVIPAFNAFKIPDGISDDLASIFDPFGNAVHTALSFDLVGEDVLITGAGPIGIMAAAVAKHVGARHVVITDVNEYRLDLARKMGVTRAVNVAEQNLEDVMKELGMTEGFDVGLEMSGVPSAFSAMLKTMNHGGRIALLGIPPSSMAIDWNQVIFKGLVIKGIYGREMFETWYKMASLIQSGLDISPIITHHFKVDDFQKGFDIMRSGASGKVILDWQ

SEQ ID NO: 11752 - protein, 330 aa, Aeropyrum pernix
MRVLVTGGAGFIGSSFVRYIVNTTDWEVLVYDKLTYAGRLENLHDVIDRIGFMRGDIADEEQFGRVLTEFEPDVVVNFAAETHVDRSINEPAPFMRTNIIGVFTILEAIRKRIDQIVLLHVSTDEVYGDLWNTGKEATESDPLNPSSPYSASKASGDLLIKAYGRTYGLKYRIVRPCNNYGPYQHVEKLIPRTIIRILHGKPPVIYGDGSQIRDWLYVEDTARAIHVVLEKGVDGEIYNVCGGMASTVKDIVVNILESMGKPRDYLVYGKSRPGEDRRYAMKCDKIRNLGWAPHVTLKEGLKITVKWYIENRWWWRPLLDKRYVLADHPW

SEQ ID NO: 11753 - protein, 394 aa, Glycine max
MGNDAGSPQGPVTCGSWIRRPENLNLVVLGRSRRGSSCPSLLEIFSFDPKTTSLSTSPLTTYVLEAEEGDPVAITVHPSGDDFVCALSNGSCKLFELYGRETNMKLLAKELAPLQGIGPQKCIAFSVDGSKFAAGGLDGHLRIMEWPSMRVILDEPRAHKSVRDMDFSLDSEFLASTSTDGSARIWKIEDGVPLTTLSRNSDEKIELCRFSKDGTKPFLFCSVQKGDTSVTAVYEISTWNKIGHKRLIRKSASVMSISNDGKYLSLGSKDGDICVVEVKKMQIYHYSKRLHLGTNIASLEFCPGERVVLTTSVEWGALVTKLTVPKDWKEWQIYLVLLGLFLASAVAFYIFFENSDSFWNFPMGKDQPARPRFKPVLKDPQSYDDQNIWGPVDM

SEQ ID NO: 11754 - protein, 426 aa, Escherichia coli O157:H7 EDL933
  unsure (1)..(426): unsure at all Xaa locations
MSSXKELMXXRSXAIPRGVGQIHPIFADRAENCRVWDVEGREYLDFAGGIAVLNTGHLHPKVVAAVEAQLKKLSHTCFQVLAYEPYLELCEIMNQKVPGDFAKKTLLVTTGSEAVENAVKIARAATKRSGTIAFSGAYHGRTHYTLALTGKVNPYSAGMGLMPGHVYRALYPCPLHGISEDDAIASIHRIFKNDAAPEDIAAIVIEPVQGEGGFYAATPAFMQRLRALCDEHGIMLIADEVQXGAGRTGTLFAMEQMGVAPDLTTFAKSIAGGFPLAGVTGRAEVMDAVAPGGLGGTYAGNPIACVAALEVLKVFEQENLLQKANDLGQKLKDGLLAIAEKHPEIGDVRGLGAMIAIELFEDGDHNKPDAKLTAEIVARARDKGLILLSCGPYYNVLRILVPLTIEDAQIRQGLEIISQCFAEAKQ

SEQ ID NO: 11755 - protein, 313 aa, Neisseria meningitidis Z2491
MAIQWFPGHMNKAKKAIAERAKSVDMVIEMLDARMPASSENPLLAQLSKGKPKLKILNKQDLADPERTKIWLEHYNSRPDTCAIALDSSETGAHGKITQACRAMIPHRQGIDKPLRVLICGIPNVGKSTLINGMIGKKSAKTGNEPGITKAEQRLFLADDFWLYDTPGMLWPKIIVEESGYNLAAGGSVGRNALDEEEVALELLDYLRRHYLPMLQERYQADKDPSSHWDENVWLEWIAKKRGAVLSGGRINYQKAAENILTDFREGKIGRITLETPNQWETWLKKARQKEAELKAIREARKAERKGQKPSEA

SEQ ID NO: 11756 - protein, 227 aa, Zea mays
  unsure (1)..(227): unsure at all Xaa locations
PFFFSTLYGPYREGADFVRGYPFSLREGAHTAVSHGLWLNIPDYDAPTQLVKPKERNERYVDAVMTIPKGTLFPMCGMNLAFDRDLIGPAMYFGLMGDGQPIGRYDDMWAGWCVKVICDXHLSLGVKTGXLPYIWHSKASNPFVNLKKEYKGIFWQEDIIPFFQNVTIPKDCDTVQKCYIYLSGQVKEKLGTIDPYFVKLGDAMVTWIEAWDELNPSTPAAANGKAK

SEQ ID NO: 11757 - protein, 618 aa, Oryza sativa; identical to SEQ ID NO: 9476

SEQ ID NO: 11758 - protein, 397 aa, Pyrococcus horikoshii
MEIGVVGKPNVGKSTFFSAATLVDVEIANYPFTTIEANVGVTYAITDHPCKELGCSPNPQNYEYRNGLALIPVKMVDVAGLVPGAHEGRGLGNKFLDDLRMASALIHVVDATGKTDPEGQPTDYHDPVEDIEFLEREIDYWIYGILSKGWDKFAKRIKLQKIKLESAIAEHLSGIGVNENDVWEAMHKLNLPEDPTKWSQDDLLAFASEIRRVNKPMVIAANKADAASDEQIKRLVREEEKRGYIVIPTSAAAELTLRKAAKAGFIEYIPGASEFKVLRDMSEKQKRALMVIKEKVLDRFGSTGVQEVINRVVFDLLKLIPVYPVHDENKLTDQFGNVLPHVFLMKKGSTPRDLAFKVHTDLGKGFLYAINARTKRRVGEDYELQFNDIVKIVSVTR

SEQ ID NO: 11759 - protein, 327 aa, Rhizobium leguminosarum bv. trifolii
MAGETVLVVGGAGYIGSHTCLDLANKGYRPVVFDNFSNGHREFVRWGPAEEGDIRDRARLDEVLAKHKPAAILHFAALIEVGESVKDPVSFYENNVIGTLTLLSAAQAAGINAFVFSSTCATYGLPQSVPLDETHRQVPINPYGRTKYIVEQALADYDQYGSLRSVVLRYFNAAGADFEGRIGEWHQPETHAIPLAIDAALGRRQGFKVFGSDYETRDGTCVRDYIHVLDLADAHVRAVEYLLKGGDSVALNLGTGTGTTVKELLGAIEEVSNRPFPVEYIGRREGDSHTLVANNDKARDVLGWVPQYDLSEIIRSAWDWHAKSNQH

SEQ ID NO: 11760 - protein, 158 aa, Bradyrhizobium japonicum USDA 110
MSAIYDFKANSLLGEEVPMRRFEGQVLLIVNTASKCGFTPQYRGLEDLYRDLSPRGFAVLGFPCNQFGAQEPGQASEIQEFCSTNYDVTFPLFEKIDVNGANAHPLYEYLKRQQSGLLGASIKWNFTKFLVDRAGRVIARYAPTARPEGLRQQIETLL

SEQ ID NO: 11761 - protein, 148 aa, Solanum tuberosum
VAVLSSSEGVCGTILFTQDGDAPTTVNGNISGLKPGLHGFHVHALGDTTNGCMSTGPHYNPAGKEHGAPEDEVRHAGDLGNITVGEDGTASFTITDKQIPLTGSQSIIGRAVVVHADPDDLGKGGHELSKSTGNAGGRIACGIIGLQG

SEQ ID NO: 11762 - protein, 1147 aa, Oryza sativa
  unsure (1)..(1147): unsure at all Xaa locations
MEKGKMAEPKTAIDKELVRHSSFDSTAITTSLPNASQKTSKTSIVHFEHQRKSPEHHFLNAANTNAPRKLQHVIVAKLHCTLTKQLRLHLEENEESCTLATSRMEPRRRRPRRKARLTELRRGVHERPSLHGKGSWPAKAFVSVIQNHPIHPCNERRRTTTSSLQPPSLAHHPQLRQIHQSAEPPSLHHPLLHRPPAEAAMGPAVEARPAIGTTSAPLRRAKTPVGAAGGHHFLRAQGPPATAAFPALARAYRPPPLLGSSPSSAGQEGDGSGQGATAITGSGRRHHRAEGHHRLAAASPIETRVLHRCRSLPLSASVVSPTALARSSGGGEVEDGEEDLVYNTNSMKNRSNRKPDATMRAVEHAEQNCTKGRREKGFRFLRDFPADSSPHRLDRARARPPRIRFIPLPSPRLRSMEKDHQPVISLRPGGGGGGPRPGRLFSPAFAAAASGSGDLLRSHVGGASKIGDPNFEVRERVRYTRDQLLELREIVDIPEAILRINQEIDIELHGEDQIWGRPESDVQVQTQXXQAQPHNRYGETDNRDWRARTVQPPAANEEKSWDNIREAKAAHASSGRQQEQVNRQDQLNHQFASKAQVGPTPALIKAEVPXXILNKLTPEKFDLLKGQLMESGITTADILKDVISLIFEKAVFEPTFCPMYAQLCSDLNEKLPSFPSEEPGGKEITFKRVLLNNCQEAFEGAESLRAEIAKLTGPDQEMERRDKERIVKLRTLGNIRLIGELLKQKMVPEKIVHHIVQELLGSGPDKKACPEEENVEAICQFFNTIGKQLDENPKSRRINDTYFIQMKELTTNLQLAPRLRFMVRDVVDLRSNNWVPRREEIKAKTISEIHDEAMKTLGLRPGATGLTRNGRNAPGGPLSPGGFPMNRPGTGGMMPGMPGTPGMPGSRKMPGMPGLDNDNWEVPRSKSMPRGDSLRNQGPLLNKPSSINKPSSINSRLLPHGSGALIDKAAGSSHEMPAAVQKKTVSLLEEYFGIRILDEAQQCIEELQCPEYYSEIVKEAINLALDKGPNFIDPLVRLLEHLHAKKIFKTEDLKTGCLLYAALLEDIGIDLPLAPALFGEVVARLSLSCGLSFEVVEEILKAVEDTYFRKGIFDAVMKTMGGNSSAKTALFSIAXVFHPRGTLVLEM

SEQ ID NO: 11763 - protein, 224 aa, Zea mays
MAEEKKQGLQLLDFWVSPFGQRCRIAMDEKGLAYEYLEQDLGNKSELLLRANPVHKKIPVLLHDGRPVCESLVIVQYLDEAFPAAAPALLPADPYARAQARFWADYVDKKLYDCGTRLWKLKGDGQAQARAEMVEILRTLEGALGDGPFFGGDALGFVDVALVPFTSWFLAYDRFGGVSVEKECPRLAAWAKRCAERPSVAKNLYPPEKVYDFVCGMKKRLGIE

SEQ ID NO: 11764 - protein, 214 aa, Paeonia veitchii
IVESVGEGVTDVKPGDHVLPIFTGECKECRHCKSEESNMCDLLRINTDRGVMLNDGKSRFSINGQPIFHFVGTSTFSEYTVLHVGCLAKINPEAPLDKVCVLSCGISTGLGATLNVAKPKKGSTVAIFGLGAVGLAAAEGARMAGASRIIGVDLNPKRFDEARKFGVTEFVNPKDYNKPVQEVIAEMTGGGVDRSVECTGSIMAMMSAFECVHD

SEQ ID NO: 11765 - protein, 351 aa, Pseudomonas aeruginosa PAO1
MTDRFTRLLGIQQPIIQAPMLGVSTPALAAAVSNAGGLGSIAITGSAAEKGRALIREVRGLTDKPFNVNLFCHRPGQADPARERAWLDYLKPLFAEFGAEPPVRLKNIYLSFLEDPTLLPMLLEERPAAVSFHFGAPPRDQVRALQAVGIRVLVCATTPEEAALVEAAGADAVVAQGIEAGGHRGVFEPERGDAAIGTLALVRLLAARGSLPVVAAGGIMDGRGIRAALELGASAVQMGTAFVLCPESSANAAYREALKGPRAARTALTVTMSGRSARGLPNRMFFDAAAPGVPPLPDYPFVYDATKALQTAALARGNHDFAAQWAGQGAALARELPAAELLRTLVEELRG

SEQ ID NO: 11766 - protein, 465 aa, Corynebacterium efficiens YS-314
MNASPTVTDQLVQTRKFKGLRARHIHFIALGSAIGTGLFYGSAGAIQAAGPSVLLVYLLGGAVVYFMLRALGEMSVRHPVRGSFAVYTRAHLGGWAGYITGWMFAFEMLIVCLADLTAIGIYMKFWFPDTAQWVWVAATLLIVGGANLASVRWFGELEFVFTLIKVTAVIAMIVGGAAILAFGLGNSPEVSGISNLWEHGGFFPNGIEGMIAAFILVLFAFGGTEIIGVAGSEAEDPEKSIPKAVNTVPARILLFYVGAILVILALNPWQTITGEESPFVQIFSTLGVNWAAGLLNLVVITAALSAINADLFGAGRVLTGLAKENLAPKIMGRVAGNGVPIMTTVIMIIVLILGVVLNVILPERVFEIVASLATFATVYVWLMILLAQVASRRQMSAQEVAGLKFPVPFYPFGQYFAILFIAFTFGIMVWYDNYHLALGVGVGFLVVMTILYYATGRPKAIAPAQ

SEQ ID NO: 11767 - protein, 319 aa, Streptomyces avermitilis MA-4680
MSGKYLVTGGAGYVGSVVAQHLIEAGHEVVVLDNLSTGFREGVPAGASFVEGDIRDAAKWLDSSFDAVLHFAAFSQVGESVVKPEKYWDNNVGGTLALLAAMREAGVRKLVFSSTAATYGEPEEVPIVETAPTRPTNPYGASKLAVDHMITGEAGAHGLAAVSLRYFNVAGAYGSCGERHDPESHLIPLVLQVAQGRRDAISVYGDDYPTPDGTCVRDYIHVADLAEAHLLALDAATPGEHLVCNLGNGNGFSVREVIETVRQVTGHPIPEIVAPRRAGDPAVLVASAATARERLGWNPARADLAGIVADAWAFAQHKE

SEQ ID NO: 11768 - protein, 262 aa, Arabidopsis thaliana
MSQEEQPKRPQEPVTYGDVFEVSGELADKPIAPEDANMMQAAETRVFGHTQKGGAAAVMQSAATANKRGGFVHPGDTTDLAAERGVTVAQTDVPGARVTTEFVGGQVVGQYVEPRPVATAAAMEAEVVGLSLQSAITIGEALEATVQTAGNKPVDQSDAAAIQAAEVRACGTNVIAPGGIAASAQSAANHNATIDRDEDKIKLIDVLAGATGKLAADKAVTRQDAEGVVSAELRNNPNLSTHPGGVAASITAAARLNERADI

SEQ ID NO: 11769 - protein, 110 aa, Pinus banksiana
HVMQAAKTLVNKGYDPEIIDIRSLKPFDLHTIGNSIKKTHRVLIVEECMRTGGIGASLRAAIIENFWDYLDAPIMCLSSQDVPTPYAGTLEDWTVVQPPQIVSAVEQLCQ

SEQ ID NO: 11770 - protein, 245 aa, Eucryphia billardieri
ALSIAGAVQSQKLAVRAISQLQSLPGGHIKLLCDTVVESVRELTGYDRVMVYKFHEDEHGEVVAESKRPDLEPYIGLHYPATDIPQASRFLFKQNRVRMIVDCHATPVRVIQDEGLIQPLCLVGSTLRAPHGCHAQYMANMGSTASLAMAVIINGNDEEAIGGRNSMRLWGLVVCHHTSARSIPFPLRYACEFLMRAFGLQLNMELQLALQLSEKHILRTQTLLCDMLLRDSPTGIVTQSPSIMD

SEQ ID NO: 11771 - protein, 152 aa, Capsicum annuum
MVKAVAVLSSSECVSGTILFSQDGDAPTTVTGNVSGLKPGLHGFHVHALGDTTNGCMSTGPHYNPAGKEHGAPEDENRHAGDLGNITVGEDGTASFTITDEQIPLTGPQSIIGRGVVVHADPDDLGKGGHELTKTTGNAGGRVACGIIGLQG

SEQ ID NO: 11772 - protein, 462 aa, Mycobacterium tuberculosis H37Rv
MNWTVDIPIDQLPSLPPLPTDLRTRLDAALAKPAAQQPTWPADQALAMRTVLESVPPVTVPSEIVRLQEQLAQVAKGEAFLLQGGDCAETFMDNTEPHIRGNVRALLQMAVVLTYGASMPVVKVARIAGQYAKPRSADIDALGLRSYRGDMINGFAPDAAAREHDPSRLVRAYANASAAMNLVRALTSSGLASLHLVHDWNREFVRTSPAGARYEALATEIDRGLRFMSACGVADRNLQTAEIYASHEALVLDYERAMLRLSDGDDGEPQLFDLSAHTVWIGERTRQIDGAHIAFAQVIANPVGVKLGPNMTPELAVEYVERLDPHNKPGRLTLVSRMGNHKVRDLLPPIVEKVQATGHQVIWQCDPMHGNTHESSTGFKTRHFDRIVDEVQGFFEVHRALGTHPGGIHVEITGENVTECLGGAQDISETDLAGRYETACDPRLNTQQSLELAFLVAEMLRD

SEQ ID NO: 11773 - protein, 392 aa, Tetrapterys microphylla
DLEPVNPADVPVTAAGALKSYKLAAKAISRLQSLPSGNISLLCDVLVKEVRDLTGYDRVMVYKFHEDEHGEVVSECRRSDLESYLGLHYPATDIPQASRFLFMKNKVRMICDCLAPPVKVIQGERLPQPLSLCGSTLRSPHGCHAQYMTNMGTIASLVMSVTINEDDDMMDGDQQQMTRKLWGLVVCHHTSPRFVPFPLRYACEFLIQVFGVQINKEVELAAQVREKHILQIQTMLCDMLLRDAPVAIITQSPNVMDLVKCDGAALYFKNKTWLLGVTPTEEQIRDIAEWLLEYHSGNTGLSTDSLMEAGYPGASVLGDVVCGMAAVSITSRDFLFWFRSHTANEIKWGGAKHDPDDKDDGRKMHPRSSFKAFLEVVKWRSMPWEDVEMDAI

SEQ ID NO: 11774 - protein, 337 aa, Pseudomonas aeruginosa PAO1
MRVLVTGGAGFIGSHVLVELLGQGAKVVVLDNLVNGSSESLKRVERITGHPVGFVLGDVRDSLLVERLLIDEKVDAVIHLAGLKAVGESVDDPLEYYESNVQGTISLLRAMQRVGVFKIVFSSSATIYQMPGTLPISESSKVGGVASPYGRTKLTAEHMLDDLARSDTRWSIAVLRYFNPIGAHESGLIGEDPCGTPNNLLPYIAQVAVGRLSRLTVHGGDYPTIDGTGVRDYIHVCDLAAGHTRALEYLGQGHGYHVWNLGTGTGYSVLQVIEAFERVSGRRIPFTVSGRRPGDVAECWADVSKAERELGWKAGLGLECMIADAWRWQVSNPSGYS

SEQ ID NO: 11775 - protein, 439 aa, Methanosarcina acetivorans C2A
MRIWTEPEMNRYESNSLTLTGAVSLGTGVMIGAGIFALLGQIAELAGMLFPIIFLIGAVVTAFSAYSYVKFSNTYPSAGGIAMYLEKAYGKGVMTGFGALLMAFSMVINESLVARTFGTYTIQLFNMDEGSFLVPLLGVGLLVFAFAVNISGNRVIEKFSFFMALIKITGIAIFGIVGLWLADFSFTYTSTDAMATTTEEYLAAVALAVLAYKGFTTITNSGSEIVDPHQNVSKAIVISIAICTIIYFLVSLAVAGSLTLPEIIEAKNFALAEAARPVFGNYGLWFTVALAIIATISGIIASVFAVSRMLAMLTDMDLIPHRHFGMPGDIQKHTLVYTIVVAILLTIFFDLSRIASLGAIFYLVMDIMIHWGLLRNMREKIKIRSYIVITAIILDAAVLSALLLTKASTDTLLVVISLIMMLLIFAGEKLFLRSHPNQE

SEQ ID NO: 11776 - protein, 449 aa, Brassica rapa
MKGVQNIYHHSYTFSFLLVFLVLILFHPALSTYVNTMSSSESLTISSNRTLVSPGGVFELGFFKPSGRSRWYLGIWYKKVSQKTYAWVANRDNPLSNSIGTLKISGNNLVLLGQSNNTVWSTNLTRCNARSPVVAELLPNGNFVMRHSNNKDSNGFLWQSFDFPTDTLLPEMKLGYDLKTGRNRFLTSWKGSDDPSSGNFVYKLDTRRGLPEFILINTFLNQRIETQRSGPWNGMEFSGIPEVQGLNYMVYNYTENSEEISYSFQMTNQSIYSRLTVSEFTLDRFTWIPPSWGWSLFWTLPTDVCDPLYLCGSYSYCDLITSPNCNCIRGFVPKNPQQWDLRDGTQGCVRTTQMSCSGDGFLRLDNMNLPDTKTATVDRTIDVRKCEEKCRSDCNCTSFAIADVRNGGLGCVFWTGELVEMRKYTVGGQDLYVRLNAADLGTIRKRHKI

SEQ ID NO: 11777 - protein, 170 aa, Coxiella burnetii RSA 493
MLSRISLLIVVLFSLFYFSLANAETVAVNMYRVAKTGHGSSVGSVTLTDTQYGLLIKPNLRGLPPGRIHGFHIHVNPDCSNKGEAAGGHLDPANTGKHLGPYNPNGHLGDLPALTVEKNGTATLPILAPRLKVKNLIGHSLMIHAGGDNYSDHPKELGGGGARIACGIVK

SEQ ID NO: 11778 - protein, 645 aa, Leptospira interrogans serovar lai str. 56601
MEKTSLYHLIRDVASVYSDRPMYWIREESGDFKGISYKDWYENLKNLSTFLIDLGMHKGNTAGLICDNRYEWSLCSLSLVTIGCVDVPRGCDATIEDLKYILEHSEAKILFLENEKVLKKLLENKSSLAKVKTILLIDPPTKWKDLENSRALLSGIQFLFLEDALLEGEKSRIKKGDKTYDQRGESLGGKDLATIIYTSGTTGAPKGVMLNHRSFTWGIHQIQEFIPGSYNDRTILFLPPWHIAERLLETTLIAWGASMACSSIPTIPADMQKVKPTVLVSVPRLWEGLYKRIYDTVRKSSPFKQKLFHFAVKMAEITTSLQDTIRDSYATTETENPNQKLLDRFIASVFLLSLVPIKILSNKILERVRNLFGGKIRFALCGAGAMPSHIQFFFRSTGIHIIETYGMTETTGIGAIGEFPIPKNGAIGAPLPGTAIKLVGENGKVVTTPGEKGVAWHKGPHVTMGYYKEPEKTSKALQDGWLDSGDILTWTHTGELKFAGRAKDTIVLSGGENLEPAPIEAKLTESEFINQVIVVGQDQKNLGVLIVPFFDRVQEEFQNQAVKIPKDPTEWSSSKEVTTFFKNIVKDKISTKAGFKSFEKIAHVHILSKEFEKGKEMTETMKLKRNVIFDLYQDVIQSLYDHDED

SEQ ID NO: 11779 - protein, 328 aa, Egeria densa
MQYKNLGRSGLRVSQLSYGSWVSFGNQVDVKEAKALLQCCRDHGVNFFDNAEVYANGRAEEIMGQAFRELGWKRSDLVVSTKIFWGGPGPNDKGLSRKHVVEGLRASLKRLDMDYVDIVYCHRPDASTPIEETVRAMNHVIDRGWAFYWGTSEWSSQQITEPWAAAENLDLVGPIVEQPEYNLLSRHKVEAEYLPLYEKYGIGLTTWSPLASGVLTGKYTKGNIPADSRFALENYKNLASRTLVDDILRKVNGLKPIAAELGVPLAQLAIAWCASNPHVSSVITGATKESQIIENMKAIDVIPLLTPEVLEKIEAVVQSKPKRPESYR

SEQ ID NO: 11780 - protein, 414 aa, SYNECHOCOCCUS SP. WH 8102
MKAISVLGSTGSIGTQTLQIAEEFPEQFRVVALTAGQNLDLLVQQIQRHQPELVALANADLLPELQQRLDALGTDRKRPQLVGGPDGLNIAASWESADLVVTGIVGCAGLLPTLAAVRAGKDLALANKETLIAAGPVVLPELKKSGSRLLPADSEHSAIFQCLQGTPWAENARLSTGVPTPGLRRIQLTASGGAFRDWKAEDLENATVADATSHPNWSMGRKITVDSASLMNKGLEVIEAHYLFGLDYDHIEIVIHPQSIIHSMIELADSSVLAQLGWPDMKLPILYCLSWPSRLETPWRRLDLTEVGQLSFRAPDPAKYPCMQLAYAAGRAGGTMPAVMNAANEEAVAQFLEEKIHFLDIPVVIEAACERHKADLIAHPQLEDVLAVDQWARMAVREQVKRGTTRVPLAALAA

SEQ ID NO: 11781 - protein, 78 aa, Glycine max; identical to SEQ ID NO: 6820

SEQ ID NO: 11782 - protein, 185 aa, Clostridium perfringens str. 13
MINHKGTKCISTERITLRPFCYDDAENMFKNWVNDPEVTKYLSWNPHENLNVTKECLDNWIKAYESDENYNWAITLKENPNEVIGSIGAVFIDNYLEQAHIGYCLSKKYWNKGIVSESLKEVLSYLFQCGFTRIEAIHHVLNPASGQVMKKCGMKFEGILRKAKKDNKGEFFDIAQYSLLKTDLE

SEQ ID NO: 11783 - protein, 169 aa, Glycine max
PILKHILCLFSSYNIHWNYGLLPQTWEDPSFANSEVEGALGDNDPVDVVEIGERQRKIGEVLKVKPLGALAMIDEGELDWKIVAISLDDPKAPFVNDVDDVEKHFPGTLTAIRDWFRDYKIPDGKPANKFGLGNKAADKDYALKVIKETNESWNKLIKRSIPAGELSLV

SEQ ID NO: 11784 - protein, 154 aa, Zea mays
  unsure (1)..(154): unsure at all Xaa locations
FWFVGEREEMAASDVEYRCFVGGLAWATDDHSLNNAFSTYGEVLESKIILDRETQRSRGFGFVTFSXXXXXRSAIEGMNGKELDGRNITVNEAQSRGGRGGGGGGYGGGRRDGGGYGGGGGGYGGGRGGYGGGGGYGGANRGGGYGNNDGNWRN

SEQ ID NO: 11785 - protein, 392 aa, Triopterys rigida
DLEPVNPADVPVTAAGALKSYKLAAKAISRLQSLPSGNISLLCDVLVKEVRDLTGYDRVMVYKFHEDEHGEVVSESRRSDLESYLGLHYPATDIPQASRFLFMKNKVRMICDCLAPPVKVIQDERLSQPLSLCGSTLRSPHGCHAQHMTNMGTIASLVMSVTVNEDDDMVDGDQPQMTRKLWGLVVCHHTSPRFVPFPLRYACEFLIQVFGLQINKEVELAAQVREKHILQIQTMLCDMLLRDAPVAIITQSPNVMDLVKCDGAALYFKNKTWLLGVTPTEEQIRDIAEWLLEYHSGNTGLSTDSLMEAGYPGASAVGDAVCGMAAVSITSRDFLFWFRSHTAKEIKWGGAKHDPDDKDDGRKMHPRSSFKAFLEVVKWRSMPWEDVEMDAI

SEQ ID NO: 11786 - protein, 326 aa, Lycopersicon esculentum
SGNGQSCYNQQQQKNPPQQQTQGFFTRELNFSEFGFDGSSNRNGNSSVSCKPESGEILNFGDSTKKSASSANVNLFTGQSQFWGLGEENNNKNQEKISYFRGSNEEGMLSFVSGTVCFFGHEVRWRRRQDSEHSDLEASVVKEADSSRVVEPEKRPRKRGRKPANGREEPLNHVEAERQRREKLNQRFFSLRAVVPNVSKMDKASLLGDAISYINELKSKLQNTESDKEDLKSQIEDLKKESRRPGPPPPPNQDLKMSSHTGGKIVDVDIDVKIIGWDAMIRIQCNKKNHPAKANGSAHGIRPRRASCQCFSCQRFDDPTSHSENG

SEQ ID NO: 11787 - protein, 146 aa, Funaria hygrometrica
MALSLFGRGSGSFFDPFDLSLLESGPSRQFARDAHAVANTQIDWRETPEAHIFKADLPGLKKEEVKVQLVDGKTLEISGERRKEEVHKDDTWHRVERAHGSFLRRFRLPDNSNVEAVEAQVQDGVLTVTIPKIQKPKPQVRQIEIA

SEQ ID NO: 11788 - protein, 392 aa, Caucanthus auriculatus
DLEPVNPADVPVTAAGALKSYKLAAKAISRLQSLPSGNISLLCDVLVKEVRDLTGYDRVMVYKFHEDEHGEVVSECHRSDLESYLGLHYPATDIPQASRFLFMKNKVRMICDCVAPPVKVIQEERLPQPLSLCGSTLRSPHGCHAQYMTNMGIIASLVMSVTVNEEDDMVDGDQPQMARKLWGLVVCHHTSTRFVPFPLRYACEFLIQVFGVQINKEVELAAQVREKHILQIQTMLCDMLLRDAPVAIITQSPNVMDLVKCDGAALYFKNKTWLLGVTPTEEQIRDITEWLLEYHSGNTGLSTDSLMEAGYPGASALGDAVCGMAAVSITSRDFLLWFRSHTAKEIKWGGAKHDPDDKDDGRKMHPRSSFKAFLEVVKWRSMPWEDMEMDAI

SEQ ID NO: 11789 - protein, 262 aa, Hordeum vulgare subsp. spontaneum
SAESNMCDLLRINTDRGVMIGDGKSRFSIGGKPIYHFVGTSTFSEYTVMHVGCVAKINPEAPLDKVCVLSCGISTGLGASINVAKPPQGSTVAIFGLGAVGLAAAEGARIAGASRIIGVDLNASRFEEARKFGCTEFVNPKDHTKPVQQVLADMTNGGVDRSVECTGNVNAMIQAFECVHDGWGVAVLVGVPHKDAEFKTHPMNFLNERTLKGTFFGNFKPRTDLPNVVEMYMKKELEVEKFITHSVPFSEINKAFDLMAKG

SEQ ID NO: 11790 - protein, 440 aa, Pseudomonas aeruginosa PAO1
MARLKRTLSLGSVVLFGIAYMTPIIVLGTFGILAETTQGHVPAAYIAASLAMLFTALSYGRMAAAFPVAGSAYTYVRKAIDSRLGFIAGWAVLLDYLFLPMAIWLIGAAYLHSAFPAVPNAVWVLAFIGVTTTINIVGLRLAKNVNGLLMLVQFLVLGAFVALCVHYVLGDPGKPLWSLQPLLGGDLQVPLVMSGAAIACYSFLGFDAVSTLTEETRDPRRNIPRAILLITLLGGLIFIVTSYFVQLAHPSFAFDSADSAAYEIARNIGGDLFVTFFLVGLIVGQFTSGLSAQASASRLLFAMGRDGVLPRPFFGRLGKRFETPANSIILCGVVALLALQMDVTTSTSFINFGAFLAFSLVNLSVVFHYYLGAERRGPRETLLFLVFPGIGLVADLWLMASLDHLAIILGLCWLALGAVYLAAITHGFREPPPEMRFEEG

SEQ ID NO: 11791 - protein, 351 aa, Oryza sativa; identical to SEQ ID NO: 11443

SEQ ID NO: 11792 - protein, 324 aa, Methanosarcina barkeri
MAITSSAFALGFGRYFSNLFGNGYLTGTLGLFILLSLIMVYGIKESARLAIFISFIEVSGLLIVIYTGLPYLGTVNYFETPDLAGIFKASTLIFFAFLGFEDIVRLSQETKEAEKTTPKALLIAIFFTVFLYMCVAITAVSMLDFRVLGLSGAPLADVVAISLGNKAFVLMSWIALFSTMNTVLVVMLGGSRIVYGMADSGALPRFLSRVHPGYRTPWVAILGVSFLSALFVLFRDVAIVANISNFMIFIIFFMVNLSLIKLRYTDPGRNRPFKVPLNIGRFPLLPFLGALSTVFLFFQLSLEVITYGLVFIGIGILIVLFRTR

SEQ ID NO: 11793 - protein, 273 aa, Zea mays
MTGSMDLPAKGGFSFDLCRRNNMLEKNGLKVPGFRKTGTTIVGLVFQDGVVLGADTRATEGPIVADKNCEKIHFMAPNIYCCGAGTAADTEAVTDMVSSQLQLHRYATGRESRVVTALTLLKSHLFKYQGHVSAALVLGGVDCTGPHLHTVYPHGSTDTLPFATMGSGSLAAMSVFESKYKEGLTREEGIQIVCEAICAGIFNDLGSGSNVDVCVITKGKTEYLRNHQLPNPRTYASSKGYSFTKGQTEVLSSKVTLLKQKVEVAEGGDAMEE

SEQ ID NO: 11794 - protein, 270 aa, Populus tremula x Populus tremuloides
MGRSPCCEKAHTNKGAWTKEEDDRLVAYIRAHGEGCWRSLPKAAGLLRCGKSCRLRWINYLRPDLKRGNFTEAEDELIIKLHSLLGNSRWSLIAGRLPGRTDNEIKNYWNTHIRRKLLNRGIDPATHRPLNEPVQEATTTISFTTTTTSVEEESRGSIIKEEIKEKLISATAFVCTEAKTQVQERCPDLNLELGISLPSQNQPDHHQPFKTGGSRSLCFACSLGLQNSKDCSCNVIVSTVGSSGSTSTKNGYDFLGMKSGVLDYRSLEMK

SEQ ID NO: 11795 - protein, 223 aa, Ralstonia metallidurans
MPAMTFDLFDALPADSNAPPAVETLAPGAVVLHGFARDAGPELLAAVQTISAEAPFRHLITPGGLRMSVAMTNCGERGWVSDRTGYRYDAVDPESGRPWPAMPAVFRSLAEHAAEAAGYPGFAPDACLINRYLPGTRLSLHQDRDELDLRAPIVSVSMGLPAVFLWGGLRRADRPGRFRLAHGDVVVWGGPSRLVFHGIAPLADGDHALTGSERINLTFRKTR

SEQ ID NO: 11796 - protein, 469 aa, Glycine max; identical to SEQ ID NO: 4368

SEQ ID NO: 11797 - protein, 378 aa, Amanita muscaria
MRFVQIDVNILPLSILLGASNLSVMANQYHNDLLAPYLALDQGGKFHAEYVWIDGDGGLRSKTTTVDQKVTDISQLRVWDFDGSSTNQAPSGNSDVYLRPSAIFKDPFRGGENILVLSETYNNDGTPNRTNHRHHTAKVMELAKDEIPWFGIEQEYTLFDADGSPYGWPKGGFPGPQGPYYCGAGTGKVFARDLIEAHYRACLYAGVNISGINAEVMPSQWEFQVGPCEGISMGDHLWMARYLLIRVAEQWGVKVSFHPKPLQGDWNGAGAHTNYSTLAMREPGGMKYIEAAIEKLAKRHDEHIAVYGEDNEMRLTGRHETGHIGTFSSGVANRGASIRVPRHVANKGYGYLEDRRPASNIDPYRVTGIIIETTILDK

SEQ ID NO: 11798 - protein, 746 aa, Geobacillus stearothermophilus
MENQNRQNAAQCPFHGSVTNQSSNRTTNKDWWPNQLNLSILHQHDRKTNPHDEEFNYAEEFQKLDYWALKEDLRKLMTESQDWWPADYGHYGPLFIRMAWHSAGTYRIGDGRGGASTGTQRFAPLNSWPDNANLDKARRLLWPIKKKYGNKISWADLFILAGNVAIESMGGKTIGFGGGRVDVWHPEEDVYWGSEKEWLASERYSGDRELENPLAAVQMGLIYVNPEGPDGKPDPKAAARDIRETFRRMGMNDEETVALIAGGHTFGKAHGAGPATHVGPEPEAAPIEAQGLGWISSYGKGKGSDTITSGIEGAWTPTPTQWDTSYFDMLFGYDWWLTKSPAGAWQWMAVDPDEKDLAPDAEDPSKKVPTMMMTTDLALRFDPEYEKIARRFHQNPEEFAEAFARAWFKLTHRDMGPKTRYLGPEVPKEDFIWQDPIPEVDYELTEAEIEEIKAKILNSGLTVSELVKTAWASASTFRNSDKRGGANGARIRLAPQKDWEVNEPERLAKVLSVYEDIQRELPKKVSIADLIVLGGSAAVEKAARDAGFDVKVPFFPGRGDATQEQTDVESFAVLEPFADGFRNYQKQEYSVPPEELLVDKAQLLGLTAPEMTVLVGGLRVLGANYRDLPHGVFTDRIGVLTNDFFVNLLDMNYEWVPTDSGIYEIRDRKTGEVRWTATRVDLIFGSNSILRSYAEFYAQDDNQEKFVRDFINAWVKVMNADRFDLVKKARESVTALQLSGIIDLTG

SEQ ID NO: 11799 - protein, 274 aa, Hyoscyamus niger
MAGESEVYINGNNGGIRWSLKGTTALVTGGSKGIGYAVVEELAGLGARVYTCSRNEKELQQCLDIWRNEGLQVEGSVCDLLLRSERDKLMQTVADLFNGKLNILVNNAGVVIHKEAKDFTKEDYDIVLGTNFEAAYHLCQLAYPFLKASQNGNVIFLSSIAGFSALPSVSLYSASKAAINQITKNLACEWAKDNIRVNSVAPGVILTPLIETAIKKNPHQKEEIDNFIVKTPMGRAGKPNEVSALIAFLCFPAASYITGQIIWADGGFTANGGF

SEQ ID NO: 11800 - protein, 427 aa, Brassica napus
DISYTLSFLLVFFVVILFRPAFSINTLSSTESLTISSSRTLVSPGNVFELGFFKTTSSSRWYLGMWYKKFPYRTYVWVANRDNPLSNDIGTLKTSGNNLVLLDHSNKSVWSTNVTRGNERSPVVAELLANGNFVMRDSNNNNASQFLWQSFDYPTDTLLPEMKLGYDLKTGLNRFLTSWISSDDPSSGDYSYKLELRRLPEFYLSSGIFRLHRSGPWNGIQFSGIPEDQKLSYMVYNFTENSEEAAYTFRMTNNSFYSILTISSTGYFERLTWAPSSMVWNVFWSSPNHQCDMYRMCGPYSYCDVNTSPVCNCIQGFRPKNRQQWDLRIPTSGCIRRTRLSCSGDGFTRMKNMKLPETTMAIVHRSIGLKECEKRCLSDCNCTAFANADIRNRGTGCVIWTRELEDIRTYSAAGQDLYVRLAAADLV

SEQ ID NO: 11801 - protein, 402 aa, Zea mays
  unsure (1)..(402): unsure at all Xaa locations
MAVEKTLPGASAGRTVLVTGGAGYIGSHAVLQLLLAGFRAVVIDNLSFHKIDLRDKGALEMVFASTRFEAVIHFAGLKAVGESVQKPLLYYDNNVIGTINLLEVMSVHGCKKLVFSSSAAVYGSPKNSPCTENFPLTPNNPYGKTKLVVEDICRDIYRSDPEWKIILLRYFNPVGAHPSGYLGEDPRGIPNNLMPYVQQVAVGRRPALTVLGNDYATRDGTGVRDYIHVVDLADGHIAALQKLFENSSIGCEAYNLGTGRGTSVLEIVKAFEKASGKKIPLIFGERRPGDAEILFSETTKAERELNWKAKYGIEEMCRDQWNWASKNPYGYGSPDSIKQNGHQTNGSADSSKQNGHRTNGSTDSPKRNGXHHAYGSADSPKRNGHCVFGSSDLKPNGNGHLR

SEQ ID NO: 11802 - protein, 293 aa, Glycine max
  unsure (1)..(293): unsure at all Xaa locations
MEEEETIAVPVNDEDDPSSTLLDLTSYQLHDLDSVELPPSLTELDLTANRLSTLDPRIGNLSHLQRLSLRQNLFSDAAVLPLSSWNALSSLEELVLRDNQFKNIPDVSVFKKLLVFDVAFNEISSLHGLSRVSDTLKELYVSKNEVAMIEEIEHFHQLQLLELGSNKLRVMENLQSLENLQELWLGRNRIKVVNLCGLKCIKKISLQSNRLTSMMGFDGCVALEELYLSHNGIAKMEGLSSLXILSALEXSSNKITLVDDIANLTKYLYSTDNLLYGFPLVDALPDIIYCTLE

SEQ ID NO: 11803 - protein, 654 aa, Tropaeolum majus
MGRFLLPILGWFLLLSCLSAFTEAEYMRYKDPKKPLNVRIKDLMSRMTLAEKIGQMTQIERKEATPDVISKYFIGSVLSGGGSVPAPKASPEAWVDLVNGMQKAALSTRLGIPMIYGIDAVHGHNNVYNATIFPHNVGLGVTRDPALIKRIGEATALECRATGIPYAFAPCIAVCRDPRWGRCYESYSEDHTIVQAMTEIIPGLQGDVPPDVKKGVPFVGGKTKVAACAKHFVGDGGTTKGIDENNTVIDSRGLFSIHMPAYHDSIKKGVATVMVSYSSWNGLRMHANRDLVTGYLKNKLKFRGFVISDWEGIDRITDPPGRNYSYSVEAGVGAGIDMIMVPEDFTKFLNELTSQVKKNIIPMSRIDDAVKRILRVKFVMGLFESPLADYSLANQLGSQEHRDLAREAVRKSLVLLKNGESADKPFVPLPKNAKKILVAGSHADNLGRQCGGWTIEWQGVNGNDLTTGTTILNAIKKTVDPTTQVIYNENPDSNYVKTNSFDYAIVVVGEPPYAEMQGDSFNLTIPEPGPTTISSVCGAVKCVVVVISGRPVVLQPYVSYMDALVAAWLPGTEGQGVTDVLFGDYGFTGKLARTWFKTVDQLPMNVGDKHYDPLFPFGFGLTTKPSNRTEFIGLIFGDLEMFSRYYVEGCKDGV

SEQ ID NO: 11804 - protein, 161 aa, Chenopodium rubrum
MSLIPNNWFNTGRRSNIFDPFSLDEIWDPFFGLPSTLSTVPRSETAAETAAFANARIDWKETPEAHVFKADLPGVKKEEVKVEVEDGNVLRISGQRAREKEEKNDTWHRVERSSGQFMRKFRLPENAKVDQVKAGMENGVLTVTVPKNEAPKPQVKAINVY

SEQ ID NO: 11805 - protein, 233 aa, Triticum aestivum
  unsure (1)..(233): unsure at all Xaa locations
WLGNRRRIIVMNREDMVSADDRNAWATYFSSQGIKVIYSNGQLGMGTMKLGRMAKSAASTVNTRRREKGLLPRPVRAGIVGYPNVGKSSLINRLLKRRMCPAAPRPGVTRELKWVRFGKDLELLDSPGILPMRISDQAAALKLAIRDDIGERSYDFADVAXILVQILLRHPAVGSEAFRKRYKIDVDSDCGKLFVTKLSVHLFNGDTTQAAFRILSDFRKGRFGWVALERPPT

SEQ ID NO: 11806 - protein, 306 aa, Hordeum vulgare subsp. spontaneum
MATAGKVIKCKAAVAWEAGKPLSMEEVEVAPPQAMEVRDKILYTALCHTDVYFWEANGQTPVFPRILGHEAGGIVESVGEDVTELVPGDHVLPVFTGECKECAHCMSEESNLCDLLRINVDRGVMIDDGQSRFTIDGKPIFHFLGTSTFSEYTVIHVGCVAKIDPEAPLDKVCLLSCGISTGLGATLNVTKPKKGMTLAIFGLGAVGLAAMEGARMSGASRIIGVDLNPAKHEQAKKFGCTDFVNPKDHTKPVQEVIVEMTDGGVNRAVECTGNADAMISAFECVHDGWGVAHKEAVFKTHPMNFL

SEQ ID NO: 11807 - protein, 449 aa, Streptomyces globisporus
MRIDPPGPPLRALPGLLRKLAVDRLGMMRDAAGLGDAVRVSMGPKKLYIFNRPDYAKHVLADNSDNYHKGIGLVQSRRVLGDGLLTSDGETWREQRRIVQPAFKPGRINQQAAAVAEEAAKLVALLRGHEGGGPVDVLQEVTGLTLGVLGRTLLDSNLTAHESLAHSFEEVQDQAMLEMVSQGTVPAWLPLPPQARFRRARRELYRVADLLVADRRSRMADGGPGDDALSRIIVAADRRRDDPARARNRLREELVTLLLAGHETTASTLGWTLHLLERHPEVRDRVRAEARAALGDGVPGPEDLHRLTYTTMVVQEAMRLFPPVWILPRVAQQRDVVGGYTVSAGSDVLVCPYIMHRHPGLWEDPERFDPERFEPRQTADRPRYAYIPFGAGPRFCVGSNLGMMEAVFVTALVTRDLDLRTVAGHRAVAEPMLSLRMRGGLPMTVSTAR

SEQ ID NO: 11808 - protein, 568 aa, Zea mays
MEEARDHRLSSTAGRPFLSGFCAAALRRKPLGARASAAAAATGEGLVRQLGVLDLVLLGIGASIGAGIFVVTGTVARDAGPGVTISFVLAGAACVLNALCYAELASRLPAVVGGAYLYTYAAFNEITAFLVFTQLMVDYHIGAASIARSLASYFIEFLELIPLLKGQIPSWVGHGEEFFGGVVSINILAPVLLIILTAILCYGVKESSAVNTFMTTLKIIIVIVIVFAGVFEVDVSNWSPFMPNGFKSVVTGATVVFFAYVGFDAVANSAEEAKRPQRDLPIGILGSLIACVLLYVAVCLVITGMVPYTLLGEDAPLAEAFAAKGLKFITVLISIGAVAGLTTTLLVGLYVQSRLYFGLGRDGLLPSVFAEVHPTRHTPVQSQIWVGCVAAVMAGLFNVRMLSHILSVGTLTGYSVVSACVITLRWNDKGTSRRSLGSMSIWQEGVLSLVIVALCGFIVGLCYRFNYAIAFMVVAFLIAVAASFALQFRQVYVDPPGFSCPGVPLVPIISVFFNMVLFAQLHEEAWYRFVILSLIAVGVYAGYGQYNAVPSSSEHSTIGYHGIPSEAA

SEQ ID NO: 11809 - protein, 472 aa, Streptomyces avermitilis MA-4680
MAGIRMGEGVLRRKPIEQIEETEAGTQLERTLGLWQLTAIGVGGIIGAGIFTLAGTVANGTAGPAVLVSFLIAGFASAAAALSYAEFAGLIPKAGSAYTYGYAVLGELAGWFIGWDLLLEYTAIVAVVAIGISGYFGFLVGELGADLPAWMLGAPGTGGGHRVDLFAAILCLLIAYLLNLGIKSAARFETVVVALKVLVVLLVIGVGVFHIDTGNYHPFFPYGVGGAFTGAATVFFAVFGYDAMSTAAEESKDAQRHMPKAIIYSLAISMVLYVAACLVLTGMQNYKDIDKESGFSTAFKSVGLGGLADVIAVGAIIGILTVMFTFMLGVTRVWFSMSRDGLLPKWFAKTHPTRHVPTRVTWIVGFASAAIAGFLPIGQAAELTNIGILLAFVVVCVAVIVLRYRQPDLPRTFRTPWMPYVPALGVIFSIWLITFLQWRTWVRFGVWLVIGLVIYFGYSYKRSELAKGVNSP

SEQ ID NO: 11810 - protein, 311 aa, Glycine max; identical to SEQ ID NO: 11002

SEQ ID NO: 11811 - protein, 751 aa, Geobacillus stearothermophilus
MENQNRQNAAQCPFHGSVTNQSSNRTTNKDWWPNQLNLSILHQHDRKTNPHDEEFNYAEEFQKLDYWALKEDLRKLMTESQDWWPADYGHYGPLFIRMAWHSAGTYRIGDGRGGASTGTQRFAPLNSWPDNANLDKARRLLWPIKKKYGNKISWADLFILAGNVAIESMGGKTIGFGGGRVDVWHPEEDVYWGSEKEWLASERYSGDRELENPLAAVQMGLIYVNPEGPDGKPDPKAAARDIRETFRRMGMNDEETVALIAGGHTFGKAHGAGPATHVGPEPEAAPIEAQGLGWISSYGKGKGSDTITSGIEGAWTPTPTQWDTSYFDMLFGYDWWLTKSPAGAWQWMAVDPDEKDLAPDAEDPSKKVPTMMMTTDLALRFDPEYEKIARRFHQNPEEFAEAFARAWFKLTHRDMGPKTRYLGPEVPKEDFIWQDPIPEVDYELTEAEIEEIKAKILNSGLTVSELVKTAWASASTFRNSDKRGGANGARIRLAPQKDWEVNEPERLAKVLSVYEDIQRELPKKVSIADLIVLGGSAAVEKAARDAGFDVKVPFFPGRGDATQEQTDVESFAVLEPFADGFRNYQKQEYSVPPEELLVDKAQLLGLTAPEMTVLVGGLRVLGANYRDLPHGVFTDRIGVLTNDFFVNLLDMNYEWVPTDSGIYEIRDRKTGEVRWTATRVDLIFGSNSILRSYAEFYAQDDNQEKFVRDFINAWVKVMNADRFDLVKKARESVTALQTSNRDRSNRDVTLQ

SEQ ID NO: 11812 - protein, 176 aa, Methanothermobacter thermautotrophicus str. Delta H
MNLWKDIEPGPSVPEVVYAVVEIPKGSRNKYEYHKDLQAFALDRVLYSAVFYPAEYGIIPRTLYDDGDPMDILVLMDEPTFPGCIIESRPIGLLRMIDGGDQDDKILAVPVADPHFADVKDISDIPEHNLKEIANFFETYKKLEGKKTETLGWEGAEKAFEAVNHSIELYRKKYME

SEQ ID NO: 11813 - protein, 126 aa, Zea mays
MVAIALLPQQGGQAACFVPTPGPAPAPPGSSATNTNDSSAAPRPAKPSAFPPPMYGGVTPGSLQPHECGGRCAGRCSATAYQKPCLFFCRKCCAACLCVPPGTYGNKNTCPCYNNWKTKRGGPKCP

SEQ ID NO: 11814 - protein, 952 aa, Oryza sativa (japonica cultivar-group); identical to SEQ ID NO: 8167

SEQ ID NO: 11815 - protein, 328 aa, Triticum aestivum
  unsure (1)..(328): unsure at all Xaa locations
SPSSKPIPTPSSPAKTLASHGESVLPRRHRQRQQETRRPLGKEGEYGGGYDRLDEEVEFRLPRGHRPVENLDTEGLEQASVDTRLAASNVGFRLLQKMGWKSGKGLGKNEQGILEPIKAGIRDAKLGXWGMQEQDDFFTGEDSVQRKRLELNVEPXEKHINRTVRXRQNREKKICSEIKEIQKTFFCNLCNKHYKLAYEFESHLSSYDHNHRKRFKEMKDIQSGGSGNRDDRPKREQQREEKELAKFAQLADAHRKQQKEKQEQPDISGEQATSKNLPTPGNQDQRRTLKFGFSKMTPSKAPVGSMSKKPKIATKVPSVFGNDSDEEA

SEQ ID NO: 11816 - protein, 495 aa, Glycine max
MAAMQRPLKRTIAIAKLRACFSSLRPAAAADIVASPPPQLPPFDHQPHPYNGPFADEVLAKRKTFLGPSVFHYYKKPCRCVSDQAKIYGFSKCSSVKLNIVEGKMQYLYDDSGRRYLDAFAGIVTVSCGHCHPEILNAITEQSKLLQHATTIYLHHTIGDFAESLAAKMPGNLKVVYFVNSGSEANELAMMMARLYTGSLGMISLRNAYHGGSSSTLGLTALNTWKYPIPEGHVHHVMNPDPYRGAFGADAASYANDVQDHIDYGTSGKVAGFIAETMQGVGGAVELAPGYLKLVYDIIHKAGGVCIADEVQTGFGRTGSHYWGFETQGVIPDIVTMAKGIGNGLPLGAVVTTPEIASVLAQKIQFNTFGGNPVCSAGGLAVLRVLDKEKRQAHCADVGSHLLERLRFLMERHDIIGNVRGRGLMVGIELVTDRDNKTPAKAETAVVFEKLRELGVLVGKGGLHGNVFRIKPPMCFSKDDADFLVDALDYSLSKL

SEQ ID NO: 11817 - protein, 328 aa, Oryza sativa
  unsure (1)..(328): unsure at all Xaa locations
XEDRGGAVDDEEAEETHTHIKGLGLDANGAAIGLAAVVGQGAAREAAGLVVDMIRQKKMAGRALLLAGPPATGKTVALGISQELEYDLEAEEYVPIPKGEVHKKKEIVQDVTLHDLDAANAQPQGGQDILSLMGQMMKPRKTEITEKLRQEINKVVNRYIDEGIAELVPGVLFIDEVHMLDIECFSYLNRALESPLSPIVILATNRGICNVRGTDMTSPHGIPVDLLDRLVIIRTETYGPTEMIQILAIRAQVEEIDIDEESLAFLGEIGQQTSLRHAIQLLSPASVVAKANGREKISKADLEEVSALYLDAKSSARLLQEQQGRYIT

SEQ ID NO: 11818 - protein, 465 aa, Burkholderia fungorum
MTQLDQLFDADRAHFMHPSTHAHDHASGALPGRIVTGAQGIRIEDHQGKSYIDAFAGLYCVNIGYGRTEVAEAIYEQAKKLAYYHTYVGHSTDTIIELSSRIIEWAPQGMKKVYYGMSGSDANETQIKLVWYYNNVKGRPDKKKIISRQRGYHGSGIVTGSLTGLASFHQYFDLPIGRVKHTVCPHWYRHAPAGMNEAQFVAYCVEELEKLIAQEGADTIAAFIAEPVMGTGGILPPPAGYWPAIQQVLKKHDILLICDEVVCGFGRLGSKMGAQHYGIAPDLITVAKGLTSAYAPLSGVIVSEGVWDVIDKASQEFGAMGHGWTYSGHPICAAAALANLDILERENLTQNAAQTGAYLLEQLHAAFDSHPLVGEVRGAGMLAALEFMADKDGRQPFDAALKVGPRVSAAALQRGLIARAMPHGDILGFAPPLITSRSEVDEIVKLAREAVDEVASAVLSPAASA

SEQ ID NO: 11819 - protein, 215 aa, Gossypium aridum
DIYYWECKGYTPLFPRILGHEASGIVESVGEGVNDLKPGDHVLPIFTGECKECRHCLSEESNNMCELLRINCDRGVMLADGKTRFSINGKPIYHFVGTSTFSQYTVVHVGQVAKISPTAPLDKVCPISCGICTGFGATVNVAKPKKGQTVAVFGLGAVGLAAAEGARVCGASRIIAVDVNPRRFEEAKRFGITEFVNPKDYDKPVQEVIVEMTGG

SEQ ID NO: 11820 - protein, 751 aa, Geobacillus stearothermophilus
MENQNRQNAAQCPFHGSVTNQSSNRTTNKDWWPNQLNLSILHQHDRKTNPHDEEFNYAEEFQKLDYWALKEDLRKLMTESQDWWPADYGHYGPLFIRMAWHSAGTYRIGDGRGGASTGTQRFAPLNSWPDNANLDKARRLLWPIKKKYGNKISWADLFILAGNVAIESMGGKTIGFGGGRVDVWHPEEDVYWGSEKEWLASERYSGDRELENPLAAVQMGLIYVNPEGPDGKPDPKAAARDIRETFRRMGMNDEETVALIAGGHTFGKAHGAGPATHVGPEPEAAPIEAQGLGWISSYGKGKGSDTITSGIEGAWTPTPTQWDTSYFDMLFGYDWWLTKSPAGAWQWMAVDPDEKDLAPDAEDPSKKVPTMMMTTDLALRFDPEYEKIARRFHQNPEEFAEAFARAWFKLTHRDMGPKTRYLGPEVPKEDFIWQDPIPEVDYELTEAEIEEIKAKILNSGLTVSELVKTAWASASTFRNSDKRGGANGARIRLAPQKDWEVNEPERLAKVLSVYEDIQRELPKKVSIADLIVLGGSAAVEKAARDAGFDVKVPFFPGRGDATQEQTDVESFAVLEPFADGFRNYQKQEYSVPPEELLVDKAQLLGLTAPEMTVLVGGLRVLGANYRDLPHGVFTDRIGVLTNDFFVNLLDMNYEWVPTDSGIYEIRDRKTGEVRWTATRVDLIFGSNSILRSYAEFYAQDDNQEKFVRDFINAWVKVMNADRFDLVKKARESVTALQVTIFYRSAAGEELQ

SEQ ID NO: 11821 - protein, 505 aa, Cochliobolus carbonum
MRTPGYIPSNGPANNIVQEYLSPDDAYPASFQDFKAMTDAEKIEVIAREAEEHGLERPKGWNVSFHYNPHVEYHHFGSSHPMKPWRLTLTKQLVLAYGLEYTMDLFEPRPANFNELAIFHDREYLSYLSKITPQNAQPDDPQYITYGFGGESNDCPVFDGLWNYVSLYTGATCSATWNLLNSRSDIAINWSGGLHHAKKNLASGFCYVNDIVIAIQLLLSHHQRVLYIDIDVHHGDGVEQAFESTDRVFTLSYHKYGIDKHGYPFFPGTGNIDETGPTDARNPGKAHSLNIPIDDGIDDEQYKWLFKTVTSAVIEKYNPTAIVLQSGADSLGGDRLGRFNLNIKAHGFCVETVKAYGRPLLIIGGGGYTPRNVARTWCHETSVCVGAQLHNELPAHVPYLQAFQGAENGDGVLYPDLHNIKRHENLNSQAKLHKLIEQALENLRYLEGAPSVTVDTRGISLEEIMKVREMIDQELEDEAEDRARLTVENSRRKKERNVGGRNERR

SEQ ID NO: 11822 - protein, 787 aa, Zea mays
  unsure (1)..(787): unsure at all Xaa locations
MQPDQPVISLRPGGGGGPRAGRLFSPAFATSVSGDFLRPHGGGASGISKIGDSHFEPRERVRYTRDQLLELREIVDVSEEILRIKQEIDVELHGEDQSWVRNDSTVQGQAQAQTQAQNRYAETDSRDWRARSAQLTPTNEEKSWDNIREAKEAYASSGRQQEQANRQDQLSSQFASKAQVGPTPALIKAEVPWSARRXGNLSEKERVLKTVKGILNKLTPEKFDLLKGQLMEAGITTADILKDVISLIFEKAVFEPTFCPMYAQLCSDLNEKLPTFPSEEPGGKEITFKRVILNNCQEAFEGASNLRAEISKLTGPDQGMERRDKERLVKLRTLGNIRLIGELLKQKMVPEKIVHHIVMELLGSGTDKKPCPEEEDVEAICHFFNTIGKQLDENPKSRRINDTYFIQMKELTMNPQLAPRLRFMVRDVIDLRSNNWVPRREEIKAKKISEIHSEAEKNLGLRPGAASGIRNGRSSPGGALLPGGAFPMNRPGTGGMMPGMPGSRKMPGMPGLDNDNWEVARSKSMPRGDSIRNQGPLLNKPSTVHKTSSINTRLLPQGSGAGLIGKSALLGTGAPPSRPLSFTPGPTPAQTTPKPIRAAPAVVPAPDKQASAPKGNTAELQKKTIALLEEYFGIRILDEAHQCIVELQSPDYYPEIVKEAVNLALDKGTNFVDPLVRLLEHLYTKKIFKTQDLESGCLLYGTLLDDIGIDLPKAPAQFGEIIARLTLLGALRFEALEVILKKMEDTYNRKAVSNAFMKTLEANPSGQAILGSPAAAAVIDACNSLLE

SEQ ID NO: 11823 - protein, 351 aa, Agrobacterium tumefaciens
MRVLVTGGAGFIGSALVRYLVSEVGADVLTVDKLTYAGNLASLKPIENAPNHRFLQADICDRAAMNDAFATFQPDYVMHLAAESHVDRSITGAADFIQTNINGTFTMLEAARQYWSSLADDAKANFRMLHVSTDEVYGSLGDDGLFEETTPYDPSSPYSASKAASDHLATAWQRTYGLPFVISNCSNNYGPFHFPEKLIPLIILNALEGKPLPVYGNGANIRDWLYVEDHARALWLIVQKGLAGEKYNVGGRNEQKNIDVVNCICSILDELRPQSKPYANLIQYVTDRPGHDARYAIDATKLETELGWKAQENFATGIRKTVEWYLDNAWWWQPLREGVYSGERLGVLTKG

SEQ ID NO: 11824 - protein, 513 aa, Glycine max
MHTLLRSTLRTKTASSLAYAVVSRSAHENLLQAPLLSRSNSTEASLAKDNSSNDVKNGQGYKGHSMLAPFTAGWQSSDLHPLIIEKSEGSYVYDINGKKYLDALAGLWATSLGGSEPRLVDAAVAQLKKLPFYHSFWNRTTLPSLDLAKELLEMFTARKMGKAFFVNSGSEANDTQVKLVWYYNNALGRPDKKKFIARAKSYHGSTLIAASLSGLPALHQKFDLPAPFVLHTDCPHYWRYHLPGETEEEFSTRLANNLEQLILKEGPETIAAFIAEPVMGAGGVIPPPSTYFEKVQAVVKKYDILFIADEVICAFGRLGTMFGCDKYNIKPDLVSLAKALSSAYLPIGAVLVSPEISEVIHDQSNKLGSFSHGFTYSGHPAACAVAIEALKIYKERNIVDQVNKIAPRFQDGIKAFSDSPIIGEIRGTGLILGTEFTDNKSPNDPFPPEWGIGAYFGAQCEKHGMLVRVAGDNIMMSPPYIISPGEVEELISIYGKALKETEKKVQELKSQRK

SEQ ID NO: 11825 - protein, 542 aa, Nicotiana tabacum
MEKDTKHGDIIFRSKLPDIYIPNHLPLHSYCFENISEFSSRPCLINGANKQIYTYADVELSSRKVAAGLHKQGIQQKDTIMILLPNSPEFVFAFIGASYLGAISTMANPLFTAAEVVKQVKASGAKIIVTQACHVNKVKDYALENNVKIICIDSAPEGCLHFSVLTQADEHDIPEVEIQPDDVVALPYSSGTTGLPKGVMLTHKGLVTSVAQQVDGENRNLYIHSEDVLLCVLPLFHIYSLNSVLLCGLRVGAAILIMQKFDIVPFLELIQNYKVTIGPFVPPIVLAIAKSPMVDDYDLSSVRTVMSGAAPLGKELEDTVRAKFPNAKLGQGYGMTEAGPVLAMCLAFAKEPFEIKSGACGTVVRNAEMKIVDPETGNSLPRNQSGEICIRGDQIMKGYLNDPEATARTIDKEGWLYTGDIGYIDDDDELFIVDRLKELIKYKGFQVAPAELEALLLNHPTFSDAAVVPMKDEQAEEVPVAFVVRSSGSTITEDEVKDFISKQVIFYKRIKRVFFVDAVPKSPSGKILRKDLRAKLAAGLPN

SEQ ID NO: 11826 - protein, 644 aa, Cryptococcus neoformans var. grubii
MAFSPSLTPSRPAPVPPRRAAITAPYIVRVTDASAAPQSNFSATSYSPSFSYTNSSIPSTKVLDTTRSRTIRSGAASIKEEGLRAFMWSKRWLVLGSAELRIYKNESSPSPVYTVSLEDIQDVQRVDMKPYCVEIETSDKLLYLAFRSDNEVYGWMDDIYSRSPRLGVSQPTNFVHQVHVGFDPKSGGFTGLPPQWSKLLTSSAITKEEAARNPEAVLDVLQFYTQQQAGNVLEGYQQFPMPTVSNQSLTTGAAATRFEGVGLGGQQHQQQQQLRSAPFTAPGSLEAITVVPARPSFETEEKTSAQKEKEKVLNPQHQLLESTRPAMAKFDKEKVTRSPGPTMEKRISTMNEVQIMEKLRSVVSAKDPSQLYSKIRKVGQGASGMVFVAKTLLNGKKVAVKQMDLSQQPRKELIVNEIIVMRESQHPNVVNFLDAFLVRGSELWVVMEYMEGGALTDVIENNKLEENQIAAICLETCRGLQHLHSRSIIHRDIKSDNLLMNTQGEVKITDFGFCAKLTDQKSKRATMVGTPYWMAPEVVKQKEYGAKVDIWSLGIMTIEMIENEPPYLDEEPLKALYLIATNGTPTLKSPEKLSQDLKHFLSVCLCVDVAFRATSTELLKHEFLQLACSVRDLAPLLRFKQDTL

SEQ ID NO: 11827 - protein, 251 aa, Zea mays; identical to SEQ ID NO: 5769

SEQ ID NO: 11828 - protein, 413 aa, Nitrosomonas europaea ATCC 19718
MTKTRHLTILGSTGSIGESTLDVVARHPGRYQVVALTADRNVEKMFEQCIQFHPPYAVMLDAQSAEQLEDRLHAAGLDTRVLSGIESLEKVASLPEIDTVMAAIVGAAGIRPTLAAARTGKHILLANKETLVMAGRVFMDTLRQHHATLLPIDSEHNAIFQSLPQHFNGDLAGSGVRRILLTASGGPFRTVDLKILETVTPEQACAHPNWVMGRKISVDSATMMNKGLEVIEAHWLFNAVPEKIQVVIHPQSVIHSMVEYIDGSVLAQLGNPDMRTPIAHALSYPERMESGVQSLDMFKVARLDFESPDFKRFPCLRLAYEALAAGGNMPAVLNAANEVAVEVFLAGRIPFTAIPVMIEDVMKSTERRDVPDLEGVLLADLQARATAREWLACNIRQSTGQPGKPASSLSAGQ

SEQ ID NO: 11829 - protein, 582 aa, Candida albicans
MLHKKETNDTFVQLNRSPSTGEQKSSGIWSSIKDSFKPALPQDKLTGVDDIPDRELTDIERININAANSNLQRKLKTRHLQMIAIGSSIGTGLFVGTGGALSTGGPAAIVLAWAISAISVFMTMQGLGELAVAFPVSGGFNLYASKFLEPGIGFAVGWNYFLQFFVLLPLELVAGAITIKYWNASINSDVFVIIFWFVVLVITMLGVRWYGEAELVFCTIKVIAVIGFIILGIVLICGGGPNHEFIGGKYWREPGPFANSFKGFASSLITAAFSFGGTEMIALTASESSNVRHALPKAIKQVFWRIVIFYLGSIIMIATLVPYNDKRLLGSSSVDVTASPFTIAIVNGGIKGLPSVINAVILISVLSVGNASVYATSRTLNSLAEQGMAPKWTGYIDRAGRPLFAILITNVFGLFALIAADNEKQVVAFNWLLALSGLSSIFTWMSINLSHIRFRRAMKVQNRSLTELPFVAQSGVWGSYFGLTLNILYLIAQFYIGLFPVGGKPNAYDFFLAYLGVPVILASWIGYKIWKRDWTLFIRAKDIDLDTGRINVDLDLLQQEIAEEKAQLAEKPFYIRIYRFWC

SEQ ID NO: 11830 - protein, 379 aa, Arachis duranensis
MGAGGRVTKIEAQKKPLSRVPHSNPPFSVGQLKKAIPPHCFERSLFISFSYVVYDLLVAYLLFYIATTYFHKLPYPFSFLAWPIYWAIQGCILTGVWVIAHECGHHAFSKYQLVDDMVGLTLHSCLLVPYFSWKISHRRHHSNTGSLDRDEVFVPKPKSKVSWYNKYMNNPPGRAISLFITLTLGWPLYLAFNVSGRPYDRFASHYDPYAPIYSNRERLLIYVSDSSVFAVTYLLYHIATLKGLGWVVCVYGVPLLIVNGFLVTITYLQHTHASLPHYDSSEWDWLRGALATVDRDYGILNKAFHHITDTHVAHHLFSTMPHYHAMEATNAIKPILGDYYQFDGTPFYKALWREAKECLYVEPDDGASKKGVYWYKNKF

SEQ ID NO: 11831 - protein, 207 aa, Glycine max
  unsure (1)..(207): unsure at all Xaa locations
SKKNRENGKNIKLVSCLPPHLYTTPHRAQPLKPKPKRQAQAQAPFIKSSCSSTQYXALCVSSLSVYASSIQQDPHQLVQTALSLSLNRTQATKTFVXNCNKFRGLKPREHAALKDCAEEISDSVDRLSRSLKELKLCKAKGXDFTWHISNVETWVSSALTDESTCGDGFSGKALNGKIKDSIRARMLNVAQVTSNALSLINHYAAQH

SEQ ID NO: 11832 - protein, 406 aa, Glycine max
MATLFQGLGVVNPSLASSNSNKFHLPSRTSLSERKDGIFVVRSDATRVSSQVLKAGARKHELLVTNAVATKEGRPAASTSKSGHELLLFEALREGLEEEMERDPCVCVMGEDVGHYGGSYKVTKGLATKFGDLRVLDTPIAENSFTGMGIGAAMTGLRPVVEGMNMGFLLLAFNQISNNCGMLHYTSGGQFKIPIVIRGPGGVGRQLGAEHSQRLESYFQSIPGIQMVACSTPYNAKGLMKAAIRSENPVILFEHVLLYNLKERIPDEEYVLSLEEAEMVRPGEHVTILTYSRMRYHVMQAAKTLVNKGYDPEVIDIRSLKPFDLHTIGNSVKKTHRVLIVEECMRTGGIGASLTAAITENFHDYLDAPIVCLSSQDVPTPYAGTLEEWTVVQPAQIVTAVEQLCK

SEQ ID NO: 11833 - protein, 1089 aa, Oryza sativa (japonica cultivar-group)
MPAKYLQMLGEERRPELHRQQAGCVTGILQAFDRRYPLAAHHSHNRLLPPAHALSSSPSVGEERTRYSSQIVLDKNMSKSWIDNQRAPLTVELSQGSYSSSSCSSSSSLDGNRSGQQDLSSTDRMLFPEKPFKSSPKLKSSSDSDCGVDYYLDDALAKLSAQPSYPTLGIRNLVKDSIYRDTRDFSIRTFTKEAEKDHLFNCGDPPRILNEPPNSAIQEKNKGTMDIDESLRVLAKLRNPSESVQQPRLSYDAPRFSCEGRESASKLREVPRLSLDIKESPLRNREIDVRPKPSMTDEDRRSSISKDYSPPLETQQEHNACKRLPSVVAKLMGLEDLPEHKDNTAISSQVSKSVTERSEEPTMLRPLSLSSQNEATPRQQRNLDATIKNVPNSKFPVETAPWKQQEKIVLPRKLPKGSKGAHGKEQHAASVYSEIEKRLKDLDFQQSNKDLRALKQILDSMQAKGLLQNKKREEPSMPKIYDGDHDNGDVTDVNLRLNSTSNTKQAPEGTPSFTTEEDSTTERSFKSPIVIMKPAKSADLLSDVTEDSAVGPLGGLSELPQLRTANSADKRKSSKKVTREAVEQHTKSSSRAPTPQHLASFDKRANGRNEEISRKQKSTSQLMTENSARRQQMQRENNGSLLKHKNSTSPRVQQKKPDSERRARPPIPSPDSSKNQRQSVERSHLDSVSPRSKFRRKPAQAQGEDFHQNGVSRRTRSLNQEGNDMSARSDGSISVASELDVEVTSTDRSAEVNILRSQHGTQTPSGRNPQKVKTSYDANKDLPSMDPAATITERPSPVSVLDSSFDQEEFFHTSKTTNSSNVDDEHHPSPSEESCKPSEKKSTELPTQPKNSKLANIASLLKKLQQLSVNKDEAPPVDHIAFLCETPSPDHRYVSEILLASGLLMKDLGSGLSQMQLHTSGYPINPDLFFVLEQRKSGWTSKPEGIHQSRSTTKPDDPKRAHRKLMFEAVNELLLDKFEKETTLITGVAARDPVMSSGQQLVKMICSGIECLKTERSRMCQEDSSVIPDAEILNRLEGWSPSFIRRELPGMVLEIERSIFKELVDEVVRGESADGQPAKAGRRRRRLFA

SEQ ID NO: 11834 - protein, 320 aa, Zea mays
MACSLPLHAPFSSSPRILSYRPAPRTLPLFRRGLRVPYHRSPSPPRALPDVAAGAVAGIRDALADAFLTSPPTWRSAAASNLAVFVSGSPLLLSGLSASGFAAAYLLGTLTWRAFGAQGFLLVVAYFVVGTAVTKLRIRQKEALGVAEKRGGRRGPGSVIGSSAAGCVCALLSIYHAGGTASSELWRLGFVASFCTKLSDTVSSEIGKAFGRTTYLVTTLKVVPRGTEGAISIEGTIAGILASVFLAGAGYLLGQVDVSQVVLCVLASQIANYVESYIGATLQDKEGFEWLNNDIVNVLNISIGAILAVLTQQLLVSWRS

SEQ ID NO: 11835 - protein, 787 aa, Triticum aestivum; identical to SEQ ID NO: 10681

SEQ ID NO: 11836 - protein, 75 aa, Zea mays
PVDLTSLIRLQLQDGKVVKHEDWWHGKPLKNRDTVGVPLVGRLAEASRRGAMLLTHALMGFGKDPTQPPPPPPTH

SEQ ID NO: 11837 - protein, 397 aa, Magnetospirillum magnetotacticum
MSPPATGFLLRCADNGRVHSILHDGMGLDAAIVGLPFTAVVHSAGVPKALDFFSGVMRDGAQYLWEIPVTPAAATMVFLGARTEEGVLIAACATQDDVGRFVSDLERINAEQASIIRDLYATRKTAATPTAVGLDDFIRLNNDLTNAQRDLASKNAELARSVEWRNLILGMAAHDLRNPLNTIGGFAELLQERIGETLPVMEARALDHIRQASGYMLRIIEDFLDFSRIETGHFTLESEPVDILSLAIEVAERITSFADEHAVSVQVKAPAPIPIVPADRNRLAQVLSNLIGNAVKFAPNGSIVTVSIVFHEPSDTVSVRVQDQGPGIPALERDKLFRPFSRTSAQSVTGEPGTGLGLAICKSVIDAHGGKIGLDGTVTDGAAFVFELPASRRPKLA

SEQ ID NO: 11838 - protein, 472 aa, Guillardia theta
MNKLFSIKIGPYYLGKTLGVGSFGKVKLGEHELCGQKVAVKILNRKKIKNLKMEEKVKREICILKLFMHPHIIRLYEVIETPTDIFVVTEYITGGELFDYIVERGRLNEDESRKFFQQMISGIEYCHNHMVVHRDLKPENILLDAHLNVKIADFGLSNIMKDGNFLKTSCGSPNYAAPEVINGKSYLGPEVDVWSCGVIMYALLCGSLPFDDENIPNLFKKIKSGIYILPGYLSDLSRDMIAKMLITNPLLRITINEIRDHPWFNSRLPKYLSFPTFKKNFVIQKKLNIDDNILELVSNKTFLSKKYIKLGIMKHERNSTAIIYHLIRESITPFDMITVDNSYIRDIIKKENVIKKSNEKEHNTSLHQAFLGIESPRENLKDILNEIQRAIKTFRSKTHNLNHFSVIIVINTNSLFETKYKKKKEIILRTTTILIQIFKRSMKYLIDLQKINGDSFFFLSTCNFIKQELNLK

SEQ ID NO: 11839 - protein, 329 aa, Zea mays
  unsure (1)..(329): unsure at all Xaa locations
MLLRLKIVVGVHSVVLPVPVPGGYGHGACYAAVEPCWRRSRRPALAAAGGLVARRPRQSATVVMALKEEPEGSSRRGFAGGGPSWDPGLEIQVPFEQRPVNEYSALKDSALYSWAELSPGSFFLRLGGLCLVTFTVLAAPIAAASFNPGKDPLKFVLAAGIGTLLLVSLAVLRIYLGWSYVGDRLLSAVVPYEETGWYDGQMWVKPPEVLARDRLLGSYKVKPVVNLLKQTLVGTGALLVGAVSLFAFAAPVEDFLHALSQPPSSATASSKPSLRKEELLRLPVEVMQDDDLAAAAAEAXRDGRPVYCRDRYYRALAGGQYCRWDDLLN

SEQ ID NO: 11840 - protein, 305 aa, Pichia jadinii
MATEKKQSTFLIDFLMGGVSAAISKTAAAPIERVKLLIQNQDEMIKQGRLAKRYDGIADCFRRTAGEEGVVSFWRGNTANVIRYFPTQALNFAFKDKFKAMFGFKKEEGYWKWFAGNLASGGLAGGSLFGSVYSLDYARTRLANDAKSAKGTGERDSTGLLDVYKKTLASDGIAGLYRGFLPSVVGIVVYRGLYFGLYDSLKPVLLTGSLENNSWAAFLLGWVVTTGASTASYPLDTVRRRMMMTSGQAVKYDGAFDAFRKIVAAEGVKSLFKGCGANILRGVAGAGVISLYDQLQVILFGKKFK

SEQ ID NO: 11841 - protein, 357 aa, Arabidopsis lyrata subsp. lyrata
AVAWEAGKPLVMEEVEVAPPQKHEVRIKILFTSLCHTDVYFWEAKGHTPLFPRIFGHEAGGIVESVGEGVTDLQPGDHVLPIFTGECGDCPHCHSEESNMCDLLRINTERGGMIHDGESRFSINGKPIHHFLGTSTFSEYTVVHSGQVAKINPDAPLDKVCIVSCGLSTGLGATLNVAKPKKGQSVAIFGLGAVGLAAAEGARIAGASRIIGVDLNSQRFDQAKEFGVTEFVNPRDHDKPVQQVIAEMTNGGVDRSVECTGSVQAMIQAFECVHDGWGVAVLVGVPSKDDAFKTHPMNLLNERTLKGTFFGNYKPKTDIPGVVEKYMNKELELEKFITHTLPFSEINKAFDYMLKGE

SEQ ID NO: 11842 - protein, 266 aa, Gossypium tomentosum
LSVEEIEVAPPQKNEVRVKIHFTSLCHTDVYFWEAKGQNPLFPRILGHEAGGVVESVGKGVIDVQPGDHVLPIFIGECKECPHCLSEASNMCDLLRINTERGGMLHDGHTRFSKDGKPIYHFLGTSTFSKYTVVHVGQVAKINPEAPLDKVCVLSCEMSTGFGATVNVAKPKKGGFVAVFGLGAVGLAAAEGARVCEASRIIGIDLNPNRSEEAKKFGCTEFVNPKDHNKPVQEVIAEMTGGGVDCSIECTGSTQAMVSAFECVHD

SEQ ID NO: 11843 - protein, 355 aa, Thermoanaerobacter tengcongensis
MYRIAVLPGDGIGPEVIEEGLKVLKAVEEKYGLRFDIKKYPFGGEAIDKYGEPYPEETRNGCLSSDAVLLGAVGGPKWDGLEGDKRPEAGLLALRKSLGVYANLRPAVLYPSLKDASPLKNELLEKGLDILVVRELTGGIYFGPRGKEAIGYGFRAYDTEVYETQEIERIAVIAFEAALRRRKKITSVDKANVLESSRLWRKTVEEVAKRYPEVELNHMYVDNCAMQLVKNPFQFDVILTNNMFGDILSDEAAQIVGSIGILPSASLRGDRVGLYEPIHGSAPDIAGKKIANPLATILSVAMMLQYSFGEEEAAQDIRKAVERALEEGFRTADLGKGIVLSTEEMGDKVVEYIKG

SEQ ID NO: 11844 - protein, 206 aa, Glycine max
ILRGIQFSISTLNKYSFDLNTLVECSSYMPLSGFHGVVSGFLVGVKQIIPDQELPFIKIKTKWLPSITVLLSIAISFWTLEATAYLPTIISGTYISWIYLRYWQRKPETKHRGDLSEDFAFSTFFPEFLRPVIDPIASIFHRMLCGRYDASNDDGYSLENEPLPGSDSIEASRRRERGARALEERLAAERLAAARRELQREAEENV

SEQ ID NO: 11845 - protein, 222 aa, Saccharomyces cerevisiae
MLEAAIYKLLKSHFRNEKYYIDITELFHEVTFQTELGQLMDLITAPEDKVDLSKFSLKKHSFIVTFKTAYYSFYLPVALAMYVAGITDEKDLKQARDVLIPLGEYFQIQDDYLDCFGTPEQIGKIGTDIQDNKCSWVINKALELASAEQRKTLDENYGKKDSVAEAKCKKIFNDLKIEQLYHEYEESIAKDLKAKISQVDESRGFKADVLTAFLNKVYKRSK

SEQ ID NO: 11846 - protein, 108 aa, Zea mays
  unsure (1)..(108): unsure at all Xaa locations
MGASATPSPAGGGRFFTGFTKLCKGLAVIIFLAHILVHLFPSAATYLTLIPXQVIMSIVGLLLLGKVLEPLWGAKELLKFIFIVNLSTSACVFVTTIXYYITQEEGYL

SEQ ID NO: 11847 - protein, 346 aa, Glycine max
MESGSSEGEEVQQRVPLRERVEWSDVTPVPQNDGPNPVVPIQYTEEFSEVMDYFRAVYLTDERSPRALALTAEAVQFNSGNYTVWHFRRLLLESLKVDLNDELEFVERMAAGNSKNYQMWHHRRWVAEKLGPEARNNELEFTKKILSVDAKHYHAWSHRQWALQTLGGWEDELNYCTELLKEDIFNNSAWNQRYFVITRSPFLGGLKAMRESEVLYTIEAIIAYPENESSWRYLRGLYKGETTSWVNDPQVSSVCLKILRTKSNYVFALSTILDLICFGYQPNEDIRDAIDALKTADMDKQDLDDDEKGEQQNLNIARNICSILKQVDPIRTNYWIWRKSRLPLSA

SEQ ID NO: 11848 - protein, 369 aa, Synechocystis sp. PCC 6803
MKSRAAVAFEVGKPLQIVEIDVAPPQQGEVLVKITHTGVCHTDAFTLSGDDPEGLFPVVLGHEGAGIVVEVGEGVTSVQLGDHVIPLYTAECGKCLFCRSGKTNLCVAVRATQGKGVMPDGTSRFSYNGQSLYHYMGCSTFSEYTVVAEVSLAKINPEANHEHVCLLGCGVTTGIGAVHNTAKVQPGDSVAVFGLGGIGLAVVQGARQAKAGRIIAIDTNPAKFELAKQMGATDCINPKDHDQPIQQVIVEMTGWGVDHSFECIGNVEVMRSALECAHRGWGQSVIIGVAGAGQEISTRPFQLVTGRKWMGTAFGGVKGRSQLPGMVEQSMRGEIQLAPFVTHTMELKDINQAFDLMHDGKSIRSVIHY

SEQ ID NO: 11849 - protein, 432 aa, Glycine max; identical to SEQ ID NO: 3143

SEQ ID NO: 11850 - protein, 404 aa, Bradyrhizobium japonicum USDA 110
MSSSVIDYLATETRLGAHNYEPIGVVLSRGEGVWVWDTDGNRYLDCLSAYSAVSQGHCHPKILAAMVEQAHRLTLTSRAFHNDQLAPFYEEIAALTGSHKVLPMNSGAEAVESAIKSVRKWGYEVKGVPDDQAEIIVCADNFHGRTLGIVGFSTDPETRGHFGPFAPGFRIIPFGDAAALEQAITPNTVAFLVEPIQGEAGVIIPPAGYFTKVRELCTANNVMLVLDEIQTGLGRTGKLLAEQHEGIEADVTLLGKALAGGFYPVSAVLSNNEVLGTLRPGQHGSTFGGNPLACAVARAAMRVLVEEGMIENAARQGARLLEGLKDIRANTVREVRGRGLMLAVELHPEAGRARRYCEALQGKGILAKDTHGHTIRIAPPLVITSDEVDWALEQFATTLTQDFS

SEQ ID NO: 11851 - protein, 276 aa, Oryza sativa (japonica cultivar-group)
MSQEQPRRPSEKAAGGGGGEQGIRYGDVFPVTGSLAAKPIAPRDAATMQSAENLVLGKTVKGGPAAAMESAASRNEEMGVVGHDQATDAAAEQGVNVSDTLVPGGGRIVTEFVAGQAVGHYVEQDDGAAVVAGVVGAAPGAVRVEEPAKITIGEALEAAALAAGGTPVERSDAAAIQAAEAKATGTDTYMPGGLAAQAQSAAVANLWTARDADKTKLGDVLSNATAKLAADKEVESGDAARVAGAEMRNKPGAAARPGGVAASMAAAARLNRGPTT

SEQ ID NO: 11852 - protein, 148 aa, Chara corallina
MSDLTDEQISEFKEAFSLFDKDGDGSITTKELGTVMRSLGQNPTEAELQDMINEVDVDGNGTIDFHEFLNLMARKMKDTDSEEELKEAFKVFDKDQNGYISAAELRHVMTNLGEKLTDEEVDEMIREADVDGDGQVNYEEFVKMMMAK

SEQ ID NO: 11853 - protein, 466 aa, Aspergillus parasiticus
MSSTAIPKRMALNRNPGTDSSVPSVSVSPFDSPRHSPSSTSLSSLASESENKGKMLDTYGNEFKIPDYTIKQIRDAIPAHCYERKALTSLYYVFRDIAMLGSIFYVFHNYVTPETVPSFPARVALWSLYTVVQGLIATGVWVLAHECGHQAFSPSKVLNDTVGWICHSALLVPYFSWKISHGKHHKATGNIARDMVFVPKTREEYASRIGKTIHDLNELMEETPIATVTNLILQQLFGWPMYLLTNVTGHNNHERQPEGRGKGKRNGYFGGVNHFNPSSPLYEAKDAKLIVLSDLGLAITGSVLYYIGSTYGWLNLLVWYGIPYLWVNHWLVAITYLQHTDPTLPHYQPEVWNFARGAAATIDRDFGFVGRHILHGIIETHVLHHYVSTIPFYHADEASEAIQKVMGSHYRTEAHTGWTGFFKALFTSARVCHWVEPTEGAKGESEGVLFYRNTNGVGVPPAKLSK

SEQ ID NO: 11854 - protein, 438 aa, Raphanus sativus
MKGVRKTYDNSYTCFLLVFSGLILLHPALSMYFNTLSSTESLTISSNRTLVSPGNVFELGFFTPESSSRWYLGIWYKKLSERTYVWVSNRDNPLSSSIGTLKISNMNLVLLDHSNKSVWSTNLTRGNERSLVVAELLANGNFVVRYFNNNDTSGFLWQSFDYPTDTLLPEMKLGYDHKTGLNRFLTSWRNSDDPSTGEISYFLDTQTGMPEFYLLQSGARIHRSGPWNGVRFSGIPGDQELSYIVNNFTENSEDVAYTFRMTNKSIYSRLKTSSEGFLERLTWIPNSITWNMFWYLPLENQCDFYMICGPYAYCDVNTSPLCNCIQGFNRSNEERWAMQDWSSGCIRRTRLSCSGDGFTRMKKMKLPETTMAVVDRSIGVKQCRKRCLSDCNCTAFANADIRNGGTGCVIWTGELEDIRTYLADGQDLYVRLAAADIG

SEQ ID NO: 11855 - protein, 79 aa, Lycopersicon esculentum
QETIAAYGEGNERRLTGRHETADINTFKWGVANRGASIRVGRDTEKEGKGYFEDRRPASNMDPYVVTSMIAETTILWNP

SEQ ID NO: 11856 - protein, 445 aa, Mycoplasma pulmonis
MIILYNLFGLLLERNLVLIKIINILKFRKSKIWKGNMSESKTKMEKWYCTQRLDENDNKFWSLKEAGKEPVAAFKTQSDTIDYFKSMNLNAHLWFQKGGKFVRTIKTYKTEKGEEMIVIDTNDSEEKTKDKLKIIEARNNKKKEERAKAEKLMQEEKAKEKALEEEKANEEARKESLRMERAKKAQEAKKARDTQEMAQKAEEEARQKALEEEKARKAQEQKRLEEEQEALEKARLEAEALEAQRKAEEEAEKARLEAEVLEAQKRAEEEAKNARLEAEALEQKRIIEEERLRAEAERLERELQEELESNQKNEREMENEVLEDVFINLEEDKKPDFQVAGHNTYEHQEVVPIVVDDKAEKEQMLKQEERKSRLAKQMEQEIKKAKREQEAKEALKNEPVKKVDLPKKNKMKKEVLNKILLSLFALVILITLILLIYLLSNRPSA

SEQ ID NO: 11857 - protein, 357 aa, Triticum aestivum
  unsure (1)..(357): unsure at all Xaa locations
VPPRAPPRGPPTARPSAIPPPRRDQRFKMSNRATHWCYACRRPIRLRGQDIICPNCNDGFIQEISETXGALNNYGMFGPRFDDRLDGRFGMMDAMSALMRRRMAEMGSNPVFDPNAAWASTTQGRPSPIGPRLIFGSNMPAQGSDDSGVNVLVRGGRRIGADRPNFSGFLVGGPSLEALFEQLLLQTGNRQGPAPAPQSVIDSMPVVRITRRHLSDDPVCPVCTERFEIGSEAREMPCKHLYHASCIIPWXLVQHNSCPVCRHPLPPQRGIGQQCSPSTTFGPSRPVGVDGAGADPGPVMRNGAGEGGSPFSFLWPFGSARSGPCSYLYGGGGGEPAPAVYNDDPGQITYSEWHYDP

SEQ ID NO: 11858 - protein, 497 aa, Brucella melitensis 16M
MCLKRHIGEGAATRIRAQCDYAFTNIRGACMNTISKPSVDLHREEEPHLARNLSNRHLQLIAIGGTIGTGLFMGSGKAVSLAGPSILLIYAITGFMLFFVMRALGEILLSNLQYRSFADFAGDYLGPCAQFFTGWTYWLCWIVTAVAEVVAVPGYVSFWFPHLAPWIPALGLITILLILNLPTVRNFGEIEFWFALIKIITIIGLIITGIYMLMTGFVLPNGTQASIAHLWNHGGFFPNGSLGFIAGFQISVFAFVGIELVGTAAAEAENPMRNLPKAINNIPIRIVLFYIGALFVIITVTPWNQVDPNSSPFVAMFSLAGIGIAAHFINFVVLTSASSSSNSGIYSTSRMVYGLATVGLAPKAFSKLSNRKVPVHALIFSCIFLLSSVVLLYAGQSMIQVFTLVTTISALLFIFIWSIILVSYLQYRRKHPERHEKSTFKMPGGRASVVMVFIFFAFVLWALTQEPDTLAAMKVTPLWFVLLGIAYWVMKLKQKQS

SEQ ID NO: 11859 - protein, 489 aa, Salmonella enterica subsp. enterica serovar Typhi
MGSKTKTTEAPALRRELKARHLTMIAIGGSIGTGLFVASGATISLAGPGGALFSYILIGLMVYFLMTSLGELAAYMPVSGSFATYGQNYVEEGFGFALGWNYWYNWAVTIAVDLVAAQLVMGWWFPDTPGWIWSALFLCVIFLLNYISVRGFGEAEYWFSLIKVATVIIFIIVGVAMIIGIFKGVEPVGWSNWTTGDAPFAGGFAAMIGVAMIVGFSFQGTELIGIAAGESENPEKNIPRAVRQVFWRILLFYVFAILIISLIIPYTDPNLLRNDVKDISVSPFTLVFQHAGLLSAAAIMNAVILTAVLSAGNSGMYASTRMLYTLACDGKAPRIFAKLSRGGVPRNALYATTVIAGLCFLTSMFGNQTVYLWLLNTSGMTGFIAWLGIAISHYRFRRGYVLQGYDVNDLPYRSGFFPLGPIFAFVLCLIITLGQNYEAFLKDTIDWGGVAATYIGIPLFLLIWFGYKLIKGTHFVRYSEMHFPERVKK

SEQ ID NO: 11860 - protein, 206 aa, Pirellula sp.
MTTNDTESKPTAKPSASNASDRIRREAVVTVEPDQQLIDPSAFIAPNATVLGEVYIAADVSIWFGAVMRGDTEKIVIGRESNVQDQCVLHCDPGMPCLIGERVTVGHSAIVHGATVEDDALIGIGAIVLNGATIGKGAIVAAGALVTEGTVIPPGMLAVGAPAKPIKEVSDSLRERSREGAQHYVKLGGRYRDEFAGTNVTSGKVD

SEQ ID NO: 11861 - protein, 229 aa, Enterococcus faecalis V583
MKQSILLIEDDPNITDFMEVVLGQERYQLTIASTGMEALTAFQTTSFDLVLLDLGLPDIDGIDLLKILRKRMHLPIIIISARNNEEEKVKALDLGADDYVTKPFGTNELLARIRTALRHQNVQTESLTVVENKDLKIDFEKQLVYKKGQEIHLTKNEYRILALMFRQLGKVVAYQTLMTKVWGPYSNDSQTLRVNMSNIRKKIESNTLKPEYLITEIGVGYRLRDHRLE

SEQ ID NO: 11862 - protein, 368 aa, Treponema pallidum
MAVNCGIIGLPNVGKSTIFSALTANVVEAANYPFCTIEPNVGMVTVPDVRLEALAGHFRPKKTVYASIECVDIAGLVKGASQGEGLGNRFLAHVREVGVLAHVVRCFEHTDIVHVHNKVDPLSDIETVHIELALADLASVEKRAVRAQKESRMGKSLQKESTLVLRALDTLREYLEMGKAACMAPLSDEERNAVRDMRLLTMKPHLYVCNTDESGMQYGNDFVRAVQEHARVHNTQAIVMCGKFEAELAQLSDVAEQNAFLQELGLRESGRAALARAVYSLMGLRTFFTAGPEECRAWTIRAGLRAPHAAGVIHSDLERGFIRAETYSFDDLASCGSVAKVREANRVRQEGKEYEVQDGDVIFFKFNV

SEQ ID NO: 11863 - protein, 278 aa, Zea mays
  unsure (1)..(278): unsure at all Xaa locations
PDLRLCLLLPLFSHLPSPEAQTRRDATPRERDGSEPPESTRPRAAVTPGRFSPPDPILRTAEHPAVVRCHGMXDQAGELQILLEYMDQGSLESHRIADERFLAHVARQVLSGIAYLHRRHIVHRDIKPSNLLIDSGRRVKIADFGVGRILNQTMDPCNSSVGTIAYMSPERINTDLNDGAYDGYAGDIWSFGLSILEFYLGRFPLGENLGKQGDWAALMFAICYSDSPQAPCNASPDFKNFISLCLQKNPVNRPSAMRLLQHPFVAQPQPQPLAAPPS

SEQ ID NO: 11864 - protein, 352 aa, Deinococcus radiodurans
MPKVITLPGDGIGPEVTAAAVQVLREVAPDVTVEEHAIGGGAYDAHGEPFPTSTRDALKEADAVLLGTVGGAHDSAWNQLPRHLRPESGLLALRKALGCYANLRPVRVQPGLEHLSPLKAELARGVDILIVRELLGGIYFDQDRKIEGDTAYNTMRYTTSEVERVAKVAFWAAEQRKGRVTSVDKANVLEVSELWRRDVQALRDRDYRSIHLNHEYVDSVAMLIVADPSRYDVILTENLFGDILSDLAAVIPGSLGLMPSASLGDGAGLFEPIHGSAPDIAGQGVANPAAAIMSVGMLLRHGLERSEAANQVDRAVALALREQPTRDLGGSADTQTFTRAVLKALGSSPSVG

SEQ ID NO: 11865 - protein, 177 aa, Arabidopsis lyrata
MENMGTRVIEPLIMGRVVGDVLDFFTPTIKMNVSYNKKQVSNGHELFPSSVSSKPRVEIHGGDLRSFFTLVMIDPDVPGPSDPFLKEHLHWIVTNIPGTTDATFGKEVVSYELPRPSIGIHRFVFVLFKQKQRRVIFPNIPSRDHFNTRKFAVEYDLGLPVAAVFFNTQRETAARKR

SEQ ID NO: 11866 - protein, 357 aa, Azotobacter vinelandii
MTKKVLVTGGAGYIGSHAVLALLEAGFDVVVLDNLRNGSAESLARVAAICGRAPGFIEGDVRDARLLDRLFAAHEIIAVLHFAGLKAVGESVREPLDYYENNVAGSLSLCRAMERAGVFRLVFSSSATVYGEPAELPLSEDSPIGLPSSPYGRSKLMVEEVLRDLVVSDPRWSVAVLRYFNPAGAHRSGLIGEDPRGVPNNLLPYIGQVAIGRLGELAVFGGDYPTPDGTGVRDYIHVLDLVDGHLEALRAIGRQTGLRVWNLGTGKGYSVLEVIRAFERASGRPIPYRIAARRPGDIPACWADPARAERELGWRAKRSLADMMADTWRWLSANPQGYDPAPYSLRPPSGSLENDFE

SEQ ID NO: 11867 - protein, 389 aa, Staphylococcus aureus subsp. aureus Mu50
MQQHSSKTAYVYSDKLLQYRFHDQHPFNQMRLKLTTELLLNANLLSPEQIVQPRIATGDELMLIHKYDYVEAIKHASHGIISEDEAKKYGLNDEENGQFKHMHRHSATIVGGALTLADLIMSGKVLNGCHLGGGLHHAQPGRASGFCIYNDIAITAQYIAKEYNQRVLIIDTDAHHGDGTQWSFYADNHVTTYSIHETGKFLFPGSGHYTERGEDIGYGHTVNVPLEPYTEDASFLECFKLTVEPVVKSFKPDIILSVNGVDIHYRDPLTHLNCTLHSLYEIPYFVKYLADSYTNGKVIMFGGGGYNIWRVVPRAWSHVFLSLIDQPIQSGYLPLEWINKWKHYSSELLPKRWEDRLNDYTYVPRTKEISEKNKKLALHIASWYESTRQ

SEQ ID NO: 11868 - protein, 152 aa, Glycine max; identical to SEQ ID NO: 2480

SEQ ID NO: 11869 - protein, 447 aa, Streptococcus pyogenes M1 GAS
MASNHMNEQEREQAKFSLSGATLYGINAVIGSGIFLLPRAIYKGLGPASIAVMFGTAILTIMLAVCFAEVSGYFGKNGGAFQYSKRAFGDFIGFNVGFLGWTVTIFAWAAMAAGFARMFIITFPAFEGWHIPLSIGLIILLSLMNIAGLKTSKIVTITATIAKLIPIVAFCACTLFFIKNGLPNFTPFVQLEPGTNLLGAISNTAVYIFYGFIGFETLSIVAGEMRDPEKNVPRALLGSISIVSVLYMLIIGGTIAMLGSQIMMTNAPVQDAFVKMIGPAGAWMVSIGALISITGLNMGESIMVPRYGAAIADEGLLPAAIAKQNQNGAPLVAILVSGAIAIVLLLTGSFESLAKLSVVFRFFQYIPTALAVMKLRKDDPDANVIFRVPFGPIIPILAVIVSLVMIWGDNPMNFVYGAVGVIIASSVYYLMHGRNHQMDQMPPKEQI

SEQ ID NO: 11870 - protein, 550 aa, Emericella nidulans
MSPPSAKSMEEGRTPSVQYGYGDPKTLEGEIEEHTATKRGLSSRQLQLLAIGGCIGTGLFVGTSTVLTQTGPAPLLMSYIVMASIVWFVMNVLGEMTTYLPIRGVSVPYLIGRFTEPSIGFASGYNYWYSFAMLLASEVTASGLIIEYWNPPVSVGLWIAIVLVVILALNVFAVEWYGESEFWFAGLKILAIIGLIILGVVLFFGGGPNHDRLGFRYWQDPGAFNPYLVPGDTGKFLGFWTALIKSGFSFIFSPELITTAAGEVEAPRRNIPKATKRFIYRVFTFYILGSLVIGVTVAYNDPTLEAGVESGGSGAGASPFVVAIQNAGIGGLNHVVNAAILISAWSSGNAWCYAGSRTLYSLAGEGQAPKIFTRTNRTGVPYVAVLATWTIGLLSFLNLSSSGQTVFYWFTNITTVGGFINWVLIGIAYLRFRKALQFHGMLDMLPFKTPLQPYGTYYVMFIISILTLTNGYAVFFPGRFTASDFLVSYIVFAIFLALYAGHKIWYRTPWLTKVSEVDIFTGKDEIDRLCENDMERQPRNWLERVWWWIF

SEQ ID NO: 11871 - protein, 320 aa, Ferroplasma acidarmanus
MEYTKLGYTDLKVSRLCLGGMSFGSSKWMADPETSGKIIKKAIDYGINFIDTANIYSSGESEKIIGEAITGYRPQLVLSTKGGGKVNDFTQGFSRAILFNEMKNSLKNLRTDYIDIYFLHTIFDNVDFRDTVHTLSSFISSGKAGYIGLSNFMGYQLAEFSTIMEMQENIKPAILQNHYNAVYREDERDAIPFCEKHGIAYSPFSPIAAGFLSGKYKRGLENETVRTKTYPVMKERYFSDSDFDILESVEDIAKKKGVKVPQLALAYVLNKGFIPVIGATKPEYLEDDIAALDVKLDREEMEAIDRNYKPHKIVKGTAGY

SEQ ID NO: 11872 - protein, 375 aa, Shigella flexneri 2a str. 301
MLNTGHLHPKVVAAVEAQLKKLSHTCFQVLAYEPYLELCEIMNQKVPGDFAKKTLLVTTGSEAVENAVKIARAATKRSGTIAFSGEYHGRTHYTLALTGKVNPYSAGMGLMPGHVYRALYPCPLHGISEDDAIASIHRIFKNDAAPEDIAAIMIEPVQGEGGFYAASPAFMQRLRALCDEHGIMLIADEVQSGAGRTGTLFAMEQMGVAPDLTTFAKSIAGGFPLAGVTGRAEVMDAVAPGGLGGTYAGNPIACVAALEVLKVFEQENLLQKANDLGQKLKDGLLAIAEKHPEIGDVRGLGSMIAIELFEDGDHSKPDAKLTAEIVARARDKGLILLSCGPYYNVLRILVPLTIEDAQIRQGLEIIGQCFDEAKQ

SEQ ID NO: 11873 - protein, 464 aa, Pseudomonas fluorescens PfO-1
MDGGSSAGTFMTQTNGPKRHLPVFQALLITLGMVITTDILKTAPTVALNVGPEHFYWVWVLGGLASMAGALCFAEMATAFPHPGGDYHFLRTAYGERMGFLFAWSRFSVMHTGWIALSAFMFADYFNAVVPLGHYGSGLFAGAIIAALVLLNLTGKHIGFMTQTVLVGLLALGFLSIASAGVWLAWQGFEPTLPSDPVVPEHTGAAGFSAAMIFVFLAFGGWSDAATLSAEVRDGRRGIFIAMLGALTVLMAIYLALNWAFVQGLGFEGLAASNAPAVELLNRAFGAPGVLLILLMVGIAAIATINSTLLVGARTTYAAARDVAQLRRFGEWDERDGVPRKALLAEGAVALLLVLFGSFTQSGFNTMVEYLTPVYWLFLSLSSLALIILRRRFPEVPRPVRVPLYPVLPLVFFGLCVYMLYSSVTVVGFGAFLGIGVLLVGAFLLAGLSCLVSTPRQALQRSVD

SEQ ID NO: 11874 - protein, 211 aa, Gossypioides kirkii
AKGQTPLFPRILAHEAGGIVESVGEGVTDLKPGDHVLPVFTGECGNCRHCKSKESNMCDLLRINADRGVMLSDGKTRFSINGKPIYHFLGTSTFSEYTVAHVGSVAKINLAAPLDKVCVLSCGISTGLGATLNVAKPTKGSTVAIFGLGAVGLPATEGARIAGASRIIGVDLNPNRFEEAKKFGCTEFVNPKDHNKPVQEVLAEMTNGGVD

SEQ ID NO: 11875 - protein, 177 aa, Brassica oleracea
ENMGTRVIEPLIVGRVVGDVLDNFTPTIKMNVSYNKKQVSNGHELFPLAVSSKPRVEIHDGDLRSFFTLVMTDPDVPNPSDPFLKGRLHWLVMNIPGTTDATFGKEVVSYELPKPNIGIHRYVFVLFRQKQRRVKFPSNIISRDQFNTREFAIENDLGLPVAAVFFNAQRETASRRR

SEQ ID NO: 11876 - protein, 523 aa, Capsicum annuum
MECLTLTGFLKHVAEKYPSHRAISVSGRLDITHARLQQLVERAASQIVAAGVKPGDVVALTFPNTIEFVIMFLAVIRARATAAPLNSAYMAEEFEFYLSDSESKLLLTAKEGNEAAQAAASKLKIPRISVTLSQPDSDVAFSPAPPESDLESMSKIVNEPSDVGLFLHTSGTTSRPKGVPLAQLNLLSSVNNIKSVYKLSDTDSTVIVLPLFHVHGLIAGLLSSLGAGAAVTLPAAGRFSASTFWSDMKKYNATWYTAVPTIHQILLDRHLSKPESDYPKLRFIRSCSAALAPSVMARLEEAFAAPVLEAYAMTEATHLMASNPLPEDGPHIPGSVGKPVGQEMGILNENGELQGPNAKGEVCIRGPNVTKGYKNNPEANKSAFQFGWFHTGDVGYLDSDGYLHLVGRIKELINRGGEKISPIELDAVLVSHPEIAQAVAFGVPDDKYGEEINCAVIPREGSNIDEAEVLRFCKKNLAAFKVPKKVFMTDSLPKTASGKIQRRLVAEHFLAQISTAKVPKFGA

SEQ ID NO: 11877 - protein, 222 aa, Pinus radiata
MGRGKIEIKRIENTTNRQVTFCKRRNGLLKKAYELSVLCDAEVALIVFSSRGRLYEFANHSVKRTIERYKKTCVDNNHGGAISESNSQYWQQEAGKLRQQIDILQNANRHLMGDGLTALNIKELKQLEVRLEKGISRVRSKKNEMLLEEIDIMQRREHILIQENEILRSKIAECQNSHNTNMLSAPEYDALPAFDSRNFLHANLIDAAHHYAHQEQTTLQLG

SEQ ID NO: 11878 - protein, 375 aa, Methanosarcina mazei Goe1
MTQYKVPVLPGDGIGPEIIAEGRKVIDAAGERFGFDVEWIEYPHGADHYLETGELISEETLKELSGYPAIYLGSIGDPRIAPGVLEKGILLTARFYFDQYINLRPIKLLEGVWTPIKDKTSKDIDFVVVRENTEDFYIGIGGRAKKGASKDLLEVKRTLYSAKFGLDIETDSEEIGYQIGLISKEGTKRVIEYAFDLAENRKKHVSSVDKANVLSDIYGFWREEFNAVAEKHPGFTTDFNFVDAITMWFVKNPEWFDVVVTPNMFGDIITDLGAMIQGGLGLAPGGNINPNGTSMFEPIHGSAPKYKGQNKVNPIATIWAGAMLIEQLGEKEAADTIVNAIQKNILDGKVKTYDMGGKNTTSDVGDDIARIIKGE

SEQ ID NO: 11879 - protein, 148 aa, Gossypium hirsutum
MTEAVIREKPGMASVKDMPLLQDGPPPGGFAPVRYARRIPNKGPSAMAIFLAAFGAFSYGMYQIGQGNKIRRALKEEKFAARRAVLPVLQAEEDERFVKEWRKYLEYEAEVMKDVPGWKVGENVYNSGRWMPPATGELRLKFGDTFFF

SEQ ID NO: 11880 - protein, 687 aa, Raphanus sativus
MLARVCGFKCSSSPAESAARLFCTRSIRDTLAKASGESCEAGFGGESLKLQSGFHEIKGLEDAIDLFSDMLRSRPLPSVVDFCKLMGVVVRMERPDLVISLYQKMERKQIRCDIYSFNILIKCFCSCSKLPFALSTFGKITKLGLHPDVVTFTTLLHGLCVEDRVSEALDFFHQMFETTCRPNVVTFTTLMNGLCREGRIVEAVALLDRMMEDGLQPTQITYGTIVDGMCKKGDTVSALNLLRKMEEVSHIIPNVVIYSAIIDSLCKDGRHSDAQNLFTEMQEKGIFPDLFTYNSMIVGFCSSGRWSDAEQLLQEMLERKISPDVVTYNALINAFVKEGKFFEAEELYDEMLPRGIIPNTITYSSMIDGFCKQNRLDAAEHMFYLMATKGCSPNLITFNTLIDGYCGAKRIDDGMELLHEMTETGLVADTTTYNTLIHGFYLVGDLNAALDLLQEMISSGLCPDIVTCDTLLDGLCDNGKLKDALEMFKVMQKSKKDLDASHPFNGVEPDVQTYNILISGLINEGKFLEAEELYEEMPHRGIVPDTITYSSMIDGLCKQSRLDEATQMFDSMGSKSFSPNVVTFTTLINGYCKAGRVDDGLELFCEMGRRGIVANAITYITLICGFRKVGNINGALDIFQEMISSGVYPDTITIRNMLTGLWSKEELKRAVAMLEKLQMSMDLSFGG

SEQ ID NO: 11881 - protein, 232 aa, Hordeum vulgare subsp. vulgare
MGRGRIEIKRIENTTNRQLTFCKRRNGLLKKAYELSVLCDAEVALVVFSSRGRLYEYSNNSVKATIERYKKATSDTSSAGTVAEINAQHYQQESAKLRQQITTLQNSNRTLIGDTMATMSHRDLKQLEGRLDKGLGKIRARKNELLSAEIEYMQRREMELQNNNFYLREKVAETERGQQQTLNMMGAASTSNEYDQNMIQCDPRTFLQFNIMQQPQYYTQQEDRKTLNSVER

SEQ ID NO: 11882 - protein, 155 aa, Zea mays; identical to SEQ ID NO: 5953

SEQ ID NO: 11883 - protein, 314 aa, Vibrio vulnificus CMCP6
MVNNSIQWFPGHMHKAQKEIAEAIPQIDVIIEVLDARIPFSSENPLISKIRGEKPVVKVLNKRDLADPELTELWIEHLEKEQNVKAMAITTSQTQEVHKILELCRKLAPHREEVGKNIRTMIMGIPNVGKSTIINTLAGRAIAQTGNQPAVTRRQQRINLQNGIVLSDTPGILWPKVENPHSGFRLAATGAVKDTAMEYDEVAFYTVEYLAKHYPEKLKERYQIEELPETDVELMEEIGQRRGALRSGGRVDLHKASEILLHELRSGTLGQITLERPEMITEELVEVELEAARRAEEKAKNKEERRKRYLRNKR

SEQ ID NO: 11884 - protein, 124 aa, Solanum tuberosum
GCITTKELGTVMRSLGQNPTEAELQDMINEVDADGNGTIDFPEFLNLMARKMKDTDSEEELKEAFRVFDKDQNGFISAAELRHVMTNLGEKLTDEEVDEMIREADVDGDGQINYDEFVKVMMAK

SEQ ID NO: 11885 - protein, 402 aa, Synechococcus leopoliensis
MKAVTLLGSTGSIGTQTLDILEQYPDRFRLVGLAAGRNVALLSEQIRRHRPEIVAIQDAAQLSELQAAIADLDNPPLILTGEAGVTEVARYGDAEIVVTGIVGCAGLLPTIAAIEAGKDIALANKETLIAAGPVVLPLLQKHGVTITPADSEHSAIFQCIQGLSTHADFRPAQVVAGLRRILLTASGGAFRDWPVERLSQVTVADALKHPNWSMGRKITVDSATLMNKGLEVIEAHYLFGLDYDYIDIVIHPQSIIHSLIELEDTSVLAQLGWPDMRLPLLYALSWPDRLSTQWSALDLVKAGSLEFREPDHAKYPCMDLAYAAGRKGGTMPAVLNAANEQAVALFLEEQIHFSDIPRLIERACDRHQTEWQQQPSLDDILAYDAWARQFVQASYQSLESVV

SEQ ID NO: 11886 - protein, 571 aa, Zea mays
  unsure (1)..(571): unsure at all Xaa locations
MALYLLFESASGYGLFHAYGIDEIGQSVEAVRSSVLDLDRFGKAVKLTAFNPFSSAVDALNQCNAISEGIMTDELRSFLELNLPKPKEGKKAKYSLGVVEPKVGSHISEVTGIPCQSNEFVQELLRGVRLHFDRFINELKDSDLEKAQLGLGHSYSRAXKVKFNVNRVDNMVIQAIFLLDTLDKDINSFSMRVREWFSWHFPELVKIVNDNYLYAKLXKFIVNKSDLAEKDIPALXDIVGDEDKAKEIVEAAKASMGQDLSPVDLINVQQFAQRVMNLSEYRKNLYEYLVTKMNDIAPNLTSLIGEVVGARLISHAGSLSNLAKCAASTLQILGAEKALFRALKTRGNTPKYGLIFHSSFIGXRASTKNKGRMARYLANKCSIASRIDCYSEASTSVFGQKLREQVEERLEFYDKGVAPRKNLDVMKAAIDSMVNDTLMDDDGKADNEKADTSAKKSKKKKTKTETDGDAMDVDKPSNVADGEAELGTEKKKKKKKHKLEEAQEENGAAHANGDAEETQTPKKKKKKSREISEEAEPKTATEGKKKKNEEAEPKTATEGKKKKKKAVKADE

SEQ ID NO: 11887 - protein, 394 aa, Lardizabala biternata
DLEPVNRADVPVTAAGALKSYKLAAKAISKLQSLPSGNISLLCDVLVHEVSDMTGYDRVMVYKFHEDEHGEVVSECLRSDLEPYLGLHYPATDIPQASRFLFLKNKVRMICDCSARSVEIIQDKRLTQPLSLGGSTLRAHHGCHTQYMSNMGSVASLVMSITINDDDDDDETETTKRKGRKLWGLVVCHHTSPRFVPFPLRYACEFLIQVFGIQLTKEVELATQLREKHILQIQTVLCDLLLRNAPVGIFTQSPNVMDLVKCDGAALYYKNKFWLLGVTPTEAQIREIAAWILEYHDGSTGLSTDSLMEAGYPGASVLGNAVCGMAAINITSKDFIFWFRSHTAKEIKWGGAKHDPVDKDDGRKMHPRSSFRAFLEVVQWRSLLWEDIEMDAIQ

SEQ ID NO: 11888 - protein, 427 aa, Brassica rapa
DNSCTLSFLLFFVLILFHPALSIYINTLSSTESLTISSNRTLVSPGSIFELGFFRTNSRWYLGMWYKKVSDRTYVWVANRDNPLSNSIGTLKISGNNLVLLDHSNKYVWSTNLTRGNGRSPVVAELLANGNFVMRDSNNNDASGFLWQSFDFPTDTLLPEMKLGYDLKTRLNRFLISWRSSDDPSSGNFSYKLENRRLPEFYISSGYFRWHRSGPWNGIRFSGIPEDPKLSYMVYNFTENSEEVAYTFRMTNNSIYSRLTLSSLGDFQRLTWNPSIGIWNLFWSSPVDPQCDAYIFCGPYAYCDVNTSPVCNCIQRFDPKNRQQWDLRDASSGCIRRTHLNCSGDGFTRMRNMKLPETTMAIVDRSTGVKECRKRCLSDCNCTAFANADIRDGGTGCVIWTGRLIDMRNYVADGQDLYVRLAAADLG

SEQ ID NO: 11889 - protein, 214 aa, Prunus persica
IDFEPVKPYEVPMTAAGALQSYKLAAKAIARLQSLPSGSMERLCDTMVQEVFELTGYDRVMAYKFHDDDHGEVVSEITKPGLEPYLGLHYPSTDIPQASRFLFMKNKVRMIVDCCAKQVKVLQDEKLPFDLTLCGSTLRSPHSCHLQYMKNMESIASLVMAVVVNEGDDEVASPDSVQPQKRKRLWGLVVCHNTSPRFVPFPLRYACEFLAQSS

SEQ ID NO: 11890 - protein, 365 aa, Dicarpellum pancheri
QSQKLAVRAISQLQSLPGGDIKLLCDTVVECVGDLTGYDRVMVYRFHEDEHGEVVAESKRPDLEPYLGLHYPATDIPQASRFLFKQNRVRMIVDCHASPVRVIQDDGLMQALCLVGSTLRAPHGCHAQYMENMGSIASLAMAVIINGNDEEATAGRNPTRLWGLVGCHHTSARCIPFPLRYACEFIMQAFGLQLNMELQLAAQLLEKHVLKTQTLLCDMLLRDSPTGIVTQSPSIMNLVKCDGAALYYQGNYYPLGVTPAEAQIKDIVEWLLAFHGDSTGLSTDSLADAGYPGAALLGDAVCGMAVAYITNRDFLFWFRSHTAKETKWGGAKHHPEDKDDGQRMHPRSSFKAFLEVVKSRSLPGR

SEQ ID NO: 11891 - protein, 138 aa, Triticum aestivum
METRQDGELTLLSVKVQHNESDRVHTVLHIQHSTWPDHGVPDDSSTVRKILKRLYYVSKEHPVVAHCSAGIGRTGAYITIHNTVERILRGEQAATNLAETVGKFRSQRPGMVQTEEQYKFCYHAIADELKDLIRNSKH

SEQ ID NO: 11892 - protein, 648 aa, Oryza sativa
  unsure (1)..(648): unsure at all Xaa locations
MATYYSSPGSERDSQTMYSRDPGSASYPMSSALGNLLYLNNPSSGPYTEFSGILQPQQNCMEMPGPGHASAMSQDPSSRESDMLSSHQGQRSFSHVKDMKNEMLMHMMDGAQGSGSELIHDDAHTGSQLEFGVLNNHNSSSVPSMQSQGLSLSLNTQIMAPSLPYWSIKPDMLTPQSYHDNLRGEDMRMKNLQSEASRAIRNSRYLKAAQELLDEVVSVWKSIKQKAQKEKVESGKADGKETDGGPKSEGVSSNPQESGANAAPELSTAEKQELQNKMAKLMAMLDEVDRKYKHYYHQMQTVVSSFDVVAGPGSAKPYTAVALQTISRHFRCLKDAINDQINVIRKKLGEEENSSGKEGKLTRLRYIDQQLRQQRAFQQYGMIPQNAWRPQRGLPENSVTILRAWLFEHFLHPYPKDSEKLMLARQTGLTRSQISNWFINARVRLWKPMIEDMYKEEIGDLEQDSNSSSDNAPRSKDKMASSEDKEDLKNSRARICETSQLSESRTSIGAMNVGGAPVGFQNEPNPDDSFMNLMLKDQRSNEVDGGLLLHNTVAQHSDENARFMAYHLAELGRYGNGNVSLTLGLQHSSSNLVXXNAQPGFPGVNEDDIYNATAPLGVTVASSDYDSMNQMDQRQRFEHSPLLHDFVA

SEQ ID NO: 11893 - protein, 166 aa, Pseudomonas aeruginosa UCBPP-PA14
MRKEYVMSAFHDLTLLGLDGQDLPLSPFKGKVLLVVNVASKCGLTPQYAGLENLYQTYRERGFAVLGVPCNQFAGQEPGSEADIQSFCSLNYGVSFPMSAKVEVNGSARHPLYRLLAGEGAEFPGDITWNFEKFLLGPDGRVLARFSPRTAPDDPALVQAIEKALG

SEQ ID NO: 11894 - protein, 223 aa, Triticum aestivum
  unsure (1)..(223): unsure at all Xaa locations
MAGEKGLVLLDFWVSPFGQRVRIALAEKGLPYEYAEEDLMAGKSDRLLRANPVHKKIPVLLHDGRAVNESLIILQYLEEAFPDAPALLPSDPYARAQARFWADYVDKKVYDCXSRLWXKLKGEPQAQARAEMLDILKTLDGALGDKPFFGGEKFGFVDAAFAPFTAWFHSYERYGEFSLPEVAPKIAAWAKRCGERESVAKSLYSPDKVYDFIGLLKKKYGIE

SEQ ID NO: 11895 - protein, 193 aa, Triticum aestivum
RLVLSLGLGLPLGELLVSREPACLQTPPARSPALIEISIEKFMTPSAFIFLYENNLFLTFRNRTVAVWNFRGELVTSFEDHLLWHQDCSTNNIYITTDQDLIISYCKSDAAADDGTASSIGSINMSDIMTGKCIAKIAANDPALTIAPRKNGSPSIWSSIPEALEDVTALFYDEDRNEIYTGNSQGLVHVWSS

SEQ ID NO: 11896 - protein, 356 aa, Nitrosomonas europaea ATCC 19718
MKIALLAGDGIGPEIMAQAERVLRYFQQEGLQIELEPGLLGGCAVDATGEPFPEATRQLAIEADAILLGAVGGTQYDGLPREKRPEQGLLAIRKELNLFANLRPVVLYPELSNASTLKPEVVAGLDILIVRELTGDIYFGRPRGIEYRDGQKVGFNTMIYSESEIRRIAHVAFQAAGRRNGRLCSVDKMNVLECTQLWRDVVTETAQSYPDVTLSHMLVDNAAMQLVRNPRQFDVVVTGNMFGDILSDEASMLTGSIGMLPSASLDDRNKGLYEPIHGSAPDIAGKGIANPLATILSAAMMLRYSFNQETAASRIEHAVQKTLQQSYRTEDIYEAGMKKVGTVEMGDRVLANLQSR

SEQ ID NO: 11897 - protein, 521 aa, Zea mays
  unsure (1)..(521): unsure at all Xaa locations
MENPAPPTNPASATPSPSRQLPDFQQSVRLKYVKLGYHYLITHGMYLLLTPLMVLVAVYLSTLSPRDVADLWAHLRLNLISVLACSTLLVFLGTAYFLTRPRPVYLVDFACYKPGPERRCTRDTFMRCSRLTGCFTDASLEFQRKILERSGLGEDTYLPPAVTRVPPNPSMDEARAEAREVMFGAVDELLAKTGVKPKDIGILVVNCSLFNPTPSLSAMVVNHYKLRGNVVSYNLGGMGCSAGLLSVDLAKDLLQTHPGSYALVISTENITLNWYSGNDRSKLVSNCLFRMGGAAVLLSNXRRSDRRRAKYELVHTVRTHKGADDRCFGCVTQEEDGEGVVGVSLSRDLMPVAGDALKTNITTLGPLVLPLSEQLAVMLFMATLXAKKLLKMKKVKPYIPDFKLAFEHFCIHAGGRAVLDELESNLALTDWHMEPSRMTLHRFGNTSSSSLWYELAYSEAKGRIRRRHRVWQIAFGSGFKCNSAVWRALRSVNPAEETNPWMDEIDRFPVDVPKVSKVSSD

SEQ ID NO: 11898 - protein, 235 aa, Zea mays
  unsure (1)..(235): unsure at all Xaa locations
MASLDAVRGDLALLILYLNKAEARDKICRAIQYGSKFISNGEPGPAQNVDKSTSLARXXXXGRSVCNDLHALISPPAKGTPLPLILLGKSKNAMLSTFLFLDQIVWAGRTGIYKNKERAEFLGRIAFYCFLGSNTFTAIIELAELQRLSTSMKKLEKELKHQELYKNEQYRMKLHKSNERLLALVKSSLDIVVAVGLLQLAPKKVTPRVTGAFGFASSLIACYQLLPSPPAKQSK

SEQ ID NO: 11899 - protein, 313 aa, Oryza sativa
  unsure (1)..(313): unsure at all Xaa locations
AALGHKQRERGQDDGRGASGVCYRCXXYFPGQPCWYLQERRGAEAWSAEENKVFERALAQVDLDSPNRWESVAAMLPRKTVIDVVNHYRDLENDVGSIEAGLVPFPHYSSSLSPASSGFTLQDWDGSDGRFRHSGYLKRGRGPDQERKKGVPWXEEEHKSFLMGLKKYGRGDWRNISRYFVTSRTPTQVASHAQKYFIRLNSGGKDKRRSSIHDITTVNLPEEDTSNPSPSPPPSVLTAHSSSSAAAVSEHARRRQASAAAARPWRRAPPLHAPSLRPGEDREEQFAHHRRRPPRRLRSGADAMRPADAASRL

SEQ ID NO: 11900 - protein, 271 aa, Ralstonia metallidurans
MPQHILTRPTEASMLKGKTALVTGSTSGIGLGIAQALAAQGANIIVNGFGDVDGAKAEIAKSGSGIQVGYHGADMSKAAEIEDMMRYAEKDFGGVDILVNNAGIQFVAKIEEFPVDRWDAIIAINLTSAFHTTRLALPSMKAKNWGRVINIASTHGLVASAEKSAYVAAKHGIVGFTKVTALETAQTGVTANAICPGWVLTPLVQKQVEARAQKEGIPVEQAKRELVIEKQPSGQFVTPEELGALAVFLSSEAARQVRGAIWNMDGGWVAQ

SEQ ID NO: 11901 - protein, 462 aa, Streptococcus agalactiae 2603V/R
MSKNNNDHTQKSENGMVRGLENRHVQLIAIAGTIGTGLFLGAGRSISLTGPSIVLVYAITGAFMFFMMRAIGEMLYQDPNQHTFINFITKYLGPGWGFFSTLSYWISLIFIGMAEITAVGEYVQFWFPEWPSWIIQIVFLAILSSINLIAVKAFGETEFWFAMIKVIAILGLIATGIFMVLTNFDTGHGYHASISNITNHFEWFPKGKLNFFMAFQMVFFAYLAIEFVGVTTSETANPRKVLPKAIQEIPMRIILFYAGSLLAIMAIFPWQQLPVNESPFVTVFKLAGIKWAAALINFVVLTSAASALNSTLYSTGRHLFQLANESPNALTKALKLDQLSRQSVPSRAIIASAVIVGASALISVLPGISDAFSLITASSSGVYISIYVLIMIAHWKYRKSPDFMEDGYKMPAYKILSPITLLFFLFVFVSLFLQDSTYIGAIGATIWIIGFGLYSHFKHKSH

SEQ ID NO: 11902 - protein, 382 aa, Bacillus halodurans
MKGISVLGATGSIGTQTLDVLANHRDKFRLVAMSVGKNLTLAEEQIHQFKPPLVSVMTDEDRKTLASKVPEGTRVVCGEEGLIEVATAEKAEILVNAVIGSVGLAPTLAAIEAKKTIALANKETLVTAGHLVTEKAREHGVKLLPVDSEHSAIFQALQGERMDRLHRIIITASGGSFRDKSRDELNGVTVEDALKHPNWSMGAKITIDSATMMNKGLEVIEAHWLFNLPYEKIDVLLHKESIIHSMVEFVDRSVIAQLGTPDMRVPIQYALSYPDRLEFHEGQQLNLWEVGKLHFAPLDMERFRCMAFAYESGKQGGTMPTVLNAANEEAVELFLNNQLSFLGIEDVIEKALERHERIDSPSLADILHVDQETRAFVHSLIK

SEQ ID NO: 11903 - protein, 256 aa, Zea mays
  unsure (1)..(256): unsure at all Xaa locations
MAEREQQEQVASDDAAEWKQVAELRAVTQAQDPSCKDEDDYTLRRFLRARDHNIGKASAMLLKYLKWKPAAKPHGAIAAAEVAREAAQGKLYLQGHDREGRPLIYGFGARHHPARRDLDEFKRYVVHVLDATVARLXPSSPPGDGRQEKFAAVADLAGWGYANCDIRGYLAALDIMQSYYPERLARVFLVHVPYVFMAAWKIVYPFIDDNTKKKFVFVPDKDLDRTLREAIDDSQLPEIYGGKLKLVTPAAKLPSH

SEQ ID NO: 11904 - protein, 390 aa, Calycanthus floridus
PYEVPMTAAGALQSYKLAAKAITRLQSLPSGSMERVVDTVVQEVFELTGYDRVMAYKFHEDDHGEVISEITKPGLEPYLGLHYPATDIPQAARFLFMKNKVRMICDCHAKPVKVCQDEKLTFDLTLCGSTLRAPHSCHLQYMENMGSIASLVMAVVINEGEEDDEVGISQQQQQRRKRLWGLVVCHNTTPRFVPFPLRYACEFLMQVFAIHVSKEIELENQLREKNILRTQTLLCDMLLRDALLGIVTQSPNIMDLVKCDGASLLYGNKMWRLGLTPTESQIHDIAMWVSEYHMDSTGLSTDSLYDAGYPKALSIGDVVCGMAAVRITAKDMLFWFRSHAAAEVRWGGAKHDPSDKDDGRRMHPRSSFKAFLEVVKTRSSPWKDYEMDAI

SEQ ID NO: 11905 - protein, 394 aa, Zea mays subsp. mays
LGAERRARLPPGEMGWPLVGGMWAFLRAFKSGKPDAFIASFVRRFGRTGVYRSFMFSSPTVLVTTAEGCKQVLMDDDAFVTGWPKATVALVGPRSFVAMPHDEHRRIRKLTAAPINGFDALTGYLPFIDSTVTSSLRAWADHGGSVEFLTELRRMTFKIIVQIFLGGADQATTRALERSYTELNYGMRAMAINLPGFAYRGALRARRRLVAVLQGVLDERRAARAKGVSGGGVDMMDRLIEAQDERGRHLDDDEIIDVLVMYLNAGHESSGHITMWATVFLQENPDMFARAKAEQEAIMRSIPSSQQGLTLRDFRKMEYLSQVIDETLRLVNISFVSFRQATRDVFVNGYLIPKGWKVQLWYRSVHMDPHVYPDPTKFDPSRWEGHSPRAGTSL

SEQ ID NO: 11906 - protein, 346 aa, Burkholderia fungorum
MKALVYHGPGKKSLDERPMPQLASATDAIVKVTRTTICGTDLHILKGDVPTCQPGRILGHEGVGIVQQVGAAVSSLKEGDHVLISCISACGKCDYCRRGMYSHCTTGGWILGNRIDGTQAEYVRIPHAETSLYPIPAGADEEALVMLSDILPTGFECGVLNGKVQPGSAVAIVGAGPIGLASLLTAQFYSPAQIIMIDRDERRLEVASRFGATACIDSRVAEPVVEVMKLTGHVGVDCAIEAVGVPDTFELCQALVAPGGVIANIGVHGVKADLHLESLWDRNISITTRLVDTVSTPMLLKTVQSGRIDPARLITHHFQLDDVLNAYDTFGRAADSHALKVIIEMS

SEQ ID NO: 11907 - protein, 269 aa, Oryza sativa (japonica cultivar-group)
MAEQQQQQRDGDFEPVYEWLDAGAHYLLRVNVPEFKKEELQVHVDPAGRLTVRGQHGGLRLNKVFQLPPTCNLDAITGRLEASVLVLTVPKKPATTAAAAALPPKANQEEEKETKKADEHDVAGKPPPPPPKTDSDQSERRTQLSAREKKEEPPKATAPAAAPPQPAARERHDEEEKARAEHKARLSREADRRIEAARARLAAQQAASRPAPAPAPEPEKTAAWWKERAAEEGMKLAEAIGKNKEVVATAVAAFALGVFVSTKLFSRNN

SEQ ID NO: 11908 - protein, 343 aa, Oryza sativa
MSDSALKDLNLAQSAELEKTKDSSAKSCITKPVLNGNKCNNTEENAPPVLPDAVTNGCEAGNADVEYIDSESLTDLEDAGATLSTLVARLDSKDWVMTCEALNNVRQLAIFHKDRLQELLEPLVPLIVKSVKNPRSAVCKTALMTCADIFKAYGDLMVDSIDPLLVQLFLKSSQDKRFVCEAAEAALISMTSWIAPSALLPKMQPYLKNRNPRIRAKASMCFSKSVPRLGVEGIKEYGMDKLVQIAATQLSDQLPESREAARKLALELQAFYEKSQASSSGEVAATSPDADADAGAESWEAFCQSKLSPLSAQAILRVTSTTKEGVAVGVTSTPPKEGVTVGC

SEQ ID NO: 11909 - protein, 1049 aa, Oryza sativa
  unsure (1)..(1049): unsure at all Xaa locations
MSSSRSNNRATCSRSSSARSKHSARVVAXTPMDAQLHAEFEGNVSAYLQNMQRGRFVQPFGCLLAVHPETFALLAYSENAAEMLDLTPHAVPTIDQREALAVGTDVRTLFRSHSFVALQKAATFGDVNLLNPILVHARTSGKPFYAIMHRIDVGLVIDLEPVNPVDLPVTATGAIKSYKLAARAIARLQSLPSGNLSLLCDVLVREVSELTGYDRVMAYKFHEDEHGEVIAECKRSDLEPYLGLHYPATDIPQASRFLFMKNKVRMICDCSATPVKIIQDDSLTQPISICGSTLRAPHGCHAQYMASMGSVASLVMSVTINEDEDDDGDTGSDQQPKGRKLWGLMINKEVELAAQAKERHILRTQTLLCDMLLRDAPVGIFTQSPNEYHDGSTGLSTDSLVEAGYPGAAALGDVVCGMAAIKISSKDFIFWFRSHTAKEIKWGGAKHEPIDADDNGRKMHPRSSFKAFLEVVKWRSVPWEDVEMDAIHSLQLILRGSLQDEDANKNNNAKSIVTAPSDDMKKIQGLLELRTVTNEMVRLIETATAPILAVDITGSINGWNNKAAELTGLPVMEAIGKPLVDLVIDDSVEVVKQILNSALQGIEEQNLQIKLKTFNHQENNGPVILMVNACCSRDLSEKVVGVCFVAQDMTGQNIIMDKYTRIQGDYVAIVKNPSELIPPIFMINDLGSCLEWNEAMQKITGIKREDAVDKLLIGEVFTHHEYGCRVKDHGTLTKLSILMNTVISGQDPEKLLFGFFNTDGKYIESLMTATKRTDAEGKITGALCFLHVASPELQHALQVQKMSEQAAMNSFKELTYIRQELRNPLNGMQFTRNLLEPSDLTEEQRKLLASNVLCQEQLKKILHDTDLESIEQCYTEMSTVDFNLEEALNTVLMQAMPQSKEKQISIDRDWPAEVSCMHLCGDNLRLQQVLADFLACMLQFTQPAEGPIVLQVIPRMENIGSGMQIAHLEFRLVHPAPGVPEALIQEMFRHSPGASREGLGLYISQKLVKTMSGTVQYLRESESSSFIVLVEFPVAQLSTKRCKASTSKF

SEQ ID NO: 11910 - protein, 615 aa, Listeria ivanovii
MRKNNWMKKVVTMLVFIVGLCVTMDFGTKVQAASIPKPLPINQIFPDPGLAKKVKRSLGKKSVTDLVSQWELNLVLEFNGNGCKIESLEGVQYFTNLKELYLSRNEISDLSPLKDLTKLSLLCINKNKLENLSDIPTAQLVRLLVDDNELRDADSLVHLKHLETLSISKNKLKNIEGLSHLSKLKLLDLSRNELRNLSVLKRLKKISWLDLTCQKCVNEPVEYNAKLVIPNTIKAPNKKLIAPSFISNNGMYINDQVTWDLPAYTSEVSYHFSKIVRVGETKALFDGTVIQPLLSKISDSENEKDLSESNQAERRKESLRKKNSTDVGSEDELDKGNESHAVSISKPLPINEIFPDPGIANEVKRILCKKSVSDIVTQKELNSIRKYFNCNESNVKSLEGLQFLTNLEELHLSENQISDLSPLKDLTNLSTLYLNKNKLKSLNGIPTAKLVRLVVDDNELSDADPLSDSLRLESLSMSKNKLRNINGLANLTKLRTLNLKKNELRDLSPLRRLKKLNSLDASWQTCVNEPVEFQPKVVIPNTVKGPNSALVSPTDISDNGEYANGYITWNLPVYKKEVVYMFSKNVRIWEIETKFDGVVIQPLYLKTPVNENQPQ

SEQ ID NO: 11911 - protein, 458 aa, Pseudomonas fluorescens
MTTTSSSLADKDMRHQLHPYTNARAHEELGPLVIDRGDGVFVIDENGKPYIEAMAGLWSAALGFSNKRLVAAAEKQMSTLPFYHLFGHKAHAPSIELAEKLINMAPVPMSKVFFTNSGSEANDTVIKLVWYLNNAQGKPARKKIISRIGGYHGITLASASLTGLLANQRGFDVPLPGFLHVGCPHHYRHALPHETEEQFADRLAAELDALIVKEGPETIAAFVGEPLMGPGGVIVPPRTYWEKIQRVCRKHDILVVADEVICGFGRTGKDVRQPDFGIEPDIMILSKQLSSSYQPISAILINDRVYQGIADQTKSFGALGHGFTGGGHPVAAAVRLENLKIIDEENLVVHAAHMGELLRRGLQGFSDHPLVGEVRGAGLIAAVELVADRATKAPLDAPGTLGRFLAGRAQEHGMITRNLGDAIAFCPPLIINEDEDEVQSIVDRFGMALDDTSKWVNG

SEQ ID NO: 11912 - protein, 500 aa, Staphylococcus epidermidis ATCC 12228
MKKNNKQNDGVQRGLKDRHISMIAIGGCIGTGLFMTSGGAIHDAGALGALIAYAVIGAMVFFLMTSLGEMATYLPVSGSFSTYATRFVDPSLGFALGWNYWFNWVITVAADVTIAAQVIQYWSPMQGIPAWVWSCIFLIIIFALNSLSVRVYGESEYWFALIKVVTVIIFIGIGILTILGIMGGEFVGFDTFTKGDGPILGGNLGGSLLSILGVFLVAGFSFQGTELIGITAGESENPERAVPKAIKQVFWRILLFYILAIFIIGMLIPYDSKALMGGGDSIATSPFTLVFKNAGLAFAASFMNAVILTSVLSAGNSGMYASTRMLYSMSKDKLAYNSFGKTNKSGVPYVSLIATGVLVILIFALQHLSGDAYEYIVAASGMTGFIAWVGIAISHFRFRRAFDKQNYDKSKLKYKAKLFPFGPIFAGILCVIVIIGQDVDFIKTGNFDMNRFFITYMGIPVFLIFFFYHKFRYKTKKIPLNKVDLRQDVSMEEVRHHKNN

SEQ ID NO: 11913 - protein, 387 aa, Gaeumannomyces graminis var. tritici
MLRSSAFALLAWASLSEAQFGIKHTQYGTSEPVYPSPEISGSGGWEAGLTKAKDFVAQLTPEEKANMVTGTPGPCVGNIAPVPRLNFTGLCLQDGPATLRQATYVTVFPGGVSAASSWDKDLIYKHGVLMAREFRDKGSHIILGPVIGPLGRSPYAGRNWEGFSPDSYLAGVLAEQTVKGMQSVGVQTCTKHYIGNEREEQRNPTTVDGRGVEAISSNIDDRTMHETYLWPFYNAVRAGTTSIMCSYQRINGSYGCQNSKTLNGLLKTELGFQGFVVSDWAATHSGVASIEAGLDMNMPGPLNFFAPTLESYFGKNITTAVNNGTLSPRRADDMIERIMTPYFALGQDKDYPPVDGSTVPISYLQPDAWNHEFPLGPTVDVRRNHHE

SEQ ID NO: 11914 - protein, 405 aa, Thermoplasma volcanium
MAYIQVREDGTLLVPDKVTIGYIEGDGIGPDITKTTINVINAALEVAYGGKRSIEWHKVLAGDEAYDKTGNRLPDSSLEELKKCVVSIKGPLTTPIGEGFRSLNVTLRQYLDLYANIRPVRYFPGVPSPVLHPEYMNMVVFRENTEDLYAGIEWRYDSEDAEKVRAFLSSTFNINLTPDTGIGIKPISKFKSTRLVRKAIQYAIANGRKSVTLVHKGNIMKYTEGAFRDWGYEVARTEFGDYTVTEAEYLKDPEKYANKIVIKDRITDNMFQQVLTRTQEYDVIATPNLNGDYLSDALAAQVGGIGLAPGANIGDHYAVFEAVHGTAPKYAGLDVANPTSLILSAEMMLDHIGWKEASKILDDAIMQTYRDQKLTQDIARLLNLKALKCSEFGEEIINRMKPIKS

SEQ ID NO: 11915 - protein, 364 aa, Saccharomyces cerevisiae
MSAPKKIVVLPGDHVGQEITAEAIKVLKAISDVRSNVKFDFENHLIGGAAIDATGVPLPDEALEASKKADAVLLGAVGGPKWGTGSVRPEQGLLKIRKELQLYANLRPCNFASDSLLDLSPIKPQFAKGTDFVVVRELVGGIYFGKRKEDDGDGVAWDSEQYTVPEVQRITRMAAFMALQHEPPLPIWSLDKANVLASSRLWRKTVEETIKNEFPTLKVQHQLIDSAAMILVKNPTHLNGIIITSNMFGDIISDEASVIPGSLGLLPSASLASLPDKNTAFGLYEPCHGSAPDLPKNKVNPIATILSAAMMLKLSLNLPEEGKAIEDAVKKVLDAGIRTGDLGGSNSTTEVGDAVAEEVKKILA

SEQ ID NO: 11916 - protein, 513 aa, Zea mays
METSAPPNAPAPPAQHGGGCRDFQQSVRLKYVKLGYHYLISHGMYLLLSPLMALVAVQLSTVSPHDLADLWEQLRFNLLSVVACSTLLVFLSTVYFLTRPRPVYLLDFACYKPESERKCTRETFMHCSKLTGSFTDENLEFQRKILERSGLGEDTYLPPAVLRVPPNPCMDEARKEARAVMFGAIDQLLEKTGVRPKDIGVLVVNCSLFNPTPSLSAMVVNHYKLRGNIVSYNLGGMGCSAGLIDLAKDLLQVHPNSYALVISMENITLNWYFGNNRSMLVSNCLFRMGGAAILLSNRRSDRRRSKYELVHTVRTHKGANDKCFGCVTQEEDEIGKIGVSLSKDLMAVAGDALKTNITTLGPLVLPLSEQLLFMGTLIAKKVLKMKIKPYIPDFKLAFEHFCIHAGGRAVLDELEKNLELTDWHMEPSRMTLYRFGNTSSSSLWYELAYTEAKGRIRKRDRIWQIAFGSGFKCNSAVWKALRTVNPAKEKSPWMDEIDNFPVDVPKISKVGGA

SEQ ID NO: 11917 - protein, 380 aa, Corynebacterium efficiens YS-314
MVTASANYRGVTMSFTVPGIIARSKGAPVEKVNVVVPDPGANDVIVDIQACGVCHTDLAYRDGDISDEFPYLLGHEAAGVVSVVGENVTHVEVGDFVVLNWRAVCGECRACKKGEPKYCFNTHNASKKMTLEDGTELSPALGIGAFIEKTLVHEGQCTKVNPDEDPAAAGLLGCGIMAGLGAAVNTADIQLGESVAVFGLGGVGMAAVAGAKLAGASKIIAVDIDERKLEWAREFGATDVINSSGLSGEGEESEVVAKIRELTGGFGTDVTIDAVGIMPTWQQAFYSRDHAGRMVMVGVPNLTSHIDIPAIDFYGRGGSLRPAWYGDCLPERDFPAYVELHLQGRFPLDKFVSERIGLDDVEEAFNTMKAGDVLRSVVEL

SEQ ID NO: 11918 - protein, 199 aa, Ceratopteris pteridoides
RNGLLKKAHELSVLCDAEIALIIFSSTGKLFEHSSSRGIKKILERYKRCSGILQDVGGTVIRDVEYWKQEAERLKERLTYMEEIQRNMLGESLGSLQIKDLQNLEAKLDSGLYKIRGAKTQLMVRQVQELQKKEQILLQQNEALRTKLAELSRLQAPVSGLTTATTSQDVQESSSGSGSRQHETSLSAAETTLQLGFAQ

SEQ ID NO: 11919 - protein, 338 aa, Oceanobacillus iheyensis HTE831
METVTYAGPKNILFQNNRKPTITKGWAIIKTSYAGICGSDLSIFAGVHPRAEAPLVMGHEFSGTIEEGHPTLKKGTRVTVNPLLRCGECYPCQNGYSHVCENLKLVGIDCDGGMGEYVKVPIHSIVPLKDNISMKLGALIEPVAVAVHAIRQGNYMPGDSVVIFGAGTIGLCVALTLRSYGAKNLIIVEPNKLRLEKAKQLGFQTLDPLSENVTEKIVEGTDNIGADYVFDCAGHPSVVEAITEVVRVRGNIVIVAMYKQPPTLDMRQGMFKELNIQFVRVYTDKDFQIAIDLVDNHKEYEDIITHVLQPEEAQKGFDLLTTHTDAVKVMYEFNRGEL

SEQ ID NO: 11920 - protein, 456 aa, Pseudomonas aeruginosa PAO1
MNSQITNAKTREWQALSRDHHLPPFTDYKQLNEKGARIITKAEGVYIWDSEGNKILDAMAGLWCVNVGYGREELVQAATRQMRELPFYNLFFQTAHPPVVELAKAIADVAPEGMNHVFFTGSGSEANDTVLRMVRHYWATKGQPQKKVVIGRWNGYHGSTVAGVSLGGMKALHEQGDFPIPGIVHIAQPYWYGEGGDMSPDEFGVWAAEQLEKKILEVGEENVAAFIAEPIQGAGGVIVPPDTYWPKIREILAKYDILFIADEVICGFGRTGEWFGSQYYGNAPDLMPIAKGLTSGYIPMGGVVVRDEIVEVLNQGGEFYHGFTYSGHPVAAAVALENIRILREEKIIEKVKAETAPYLQKRWQELADHPLVGEARGVGMVAALELVKNKKTRERFTDKGVGMLCREHCFRNGLIMRAVGDTMIISPPLVIDPSQIDELITLARKCLDQTAAAVLA

SEQ ID NO: 11921 - protein, 194 aa, Brucella suis 1330
MSGKKILMLCGDFGEDYETMVPFQTLLTVGHTVHAVCPGKKAGDHIATAIHDFEGHQTYTEKPGHNFTLNATFADVKPENYDALVIPGGRGPEYLRLDEKVIAVVKHFFAANKPVAAVCHGAQLLAAARVLEGRTCSAYPACRPEVELAGGKYADIAIDQAVTDGNLVTSPAWPAHPAWLSQFLAVLGTKITHG

SEQ ID NO: 11922 - protein, 522 aa, Triticum aestivum
  unsure (1)..(522): unsure at all Xaa locations
MDPSSAGAGGNSLPSVGPDGQKRRVCYFYDSEVGNYYYGQGHPMKPHRIRMTHSLLAQYGLLDQMQVLRPNPAXRDRDLCRFHADDYISFLRSVTPETQQDQIRALKRFNVGEDCPVFDGLYSFCQTYAGAXVGGAVKLNHGLDIAINWSGGLHHAKKCEASGFCYVNDIVLAILELLKHHQRVLYVDIDIHHGDGVEEAFYTTDRVMTVSFHKFGDYFPGTGDVRDIGHSKGKYYSLNVPLDDGXIDDESYQSLFKPIMAKVMEVFQPGAVVLQCGADSLSGDRLGCFNLSIRGHAECVKYMRSFNVPLLLLGGGGYTIRNVARCWCYETGVALGQELEDKMPVNEYYEYFGPDYTLHVAPSNMENKNTRYELDNIRTKLLDNLSKLRHAPSVQFQERPPDTEFPEPDEDEDDQDERHDDPDSDMEMDYHTPLEDSARRITIQGTRVKRESAGAETKDQQDGSRVTGEHRGPEPMAEDMGPSKQAHQVDANAMTVDEPGIVKTESGSSTKLPDPPAIYQKP

SEQ ID NO: 11923 - protein, 392 aa, Saruma henryi
PYEVPMTAAGALQSYKLAAKAISRLQSVPSGCLDRLIDTVVQEVYELTGYDRVMAYKFHEDDHGEVISEVTKPDLEPYLGLHYPATDIPQAARFLFMKNKVRMICDCRAKSVKVYQDEHLSFDLTLCGSTLRAPHSCHLQYMGNMSSIASLVMAVVINEGEEDDDGPDSTQQQAQPKRKRLWGLVVCHNTTPRFVPFPLRYACEFLMQVFAIHVNKELELENQIREKNILRTQTLLCDMLLRDAPLGIVTQSPNIMDLIKCDGAALLYENKVYRLGVTPTESQLHEIVQWLSEHHMDSTGLSTDSLHEAGYPKALSLGDIVCGMAAVRITTHDMLFWFRSHTAAEVKWGGAKHDPSDKDDGRRMHPRSSFKAFLEVVKTRSLPWKDYEMDAI

SEQ ID NO: 11924 - protein, 185 aa, Enterococcus faecalis V583
MNYPLIFAENQRIETERLILRPVTLADAEDMYEYASDEETVRYVFLKNQTIAETRQNIAKFFMGEPLGKYGIEVKETGKMIGTIDLRVNETNNIGELGYVLNRTFWGNGYMPEAATALVELGFAKMKLMRIFALHDQDNPASGRVMEKIGFTYEGTLPNARISKGKIVTDVYRGMTLETWQNRQK

SEQ ID NO: 11925 - protein, 120 aa, Oryza sativa
AYNGVDVNRGKDGLWPGCGMLLQIQPATGGNRLRFYCPTCPYVCPVKNKARIVKKASLVKKEVEPIFSDSDVKNAPKTTTTCPRCQNGEAYYRQMQIRSADEPMSTFYKCCKCQFDWRED

SEQ ID NO: 11926 - protein, 323 aa, Xylella fastidiosa Ann-1
MTVLVTGAAGFIGAHVCRALAARNDTVVGLDNYNAYYDPQLKRDRVTALCPDVHIRTLDLTDRERCAALFNEVQPDQVVHLAAQAGVRYSIENPHAYVDSNLVGFLNVLELCRHCRVQHLVYASSSSVYGDSAIPPFSEQQRVDQPRSLYGATKVANEVMAYSYAQLYGLRATGLRFFTVYGPWGRPDMAPLIFSRAVMEGRPIEVFNHGRMERDFTFINDIVAGVIGALDAPGEQAVPHRLFNLGNHTPVLLEHFIKVIEQAAGRPADKHYKPMQLGDMMATMADIAAARAAFGFEPVTSIEIGMPQVVEWCRHYFDTRAST

SEQ ID NO: 11927 - protein, 225 aa, Zea mays
  unsure (1)..(225): unsure at all Xaa locations
PADRAEARDKICRSDTSTGHKFISNGEPGPAQNVDKSTSLARKVFRLCKFVNDLHALISPPAKGTPLXLILLGKSKNAMLSTFLFLDQIVWAGRTGIYKNKEXRAEFLGRIAFHCFLGSNTCTAIIEXAELQRLSTSMKKLEKELKHQELYKNEQYRMKLHKSNERLLXALVKSSLDIVGGPWGSCSWAPEEGDPPASRGRVWASPSSLIACYQLLPSPPAKQSK

SEQ ID NO: 11928 - protein, 254 aa, Glycine max
  unsure (1)..(254): unsure at all Xaa locations
LFLSFLYQLSPTDSHTHSLSLSSTSSSSSFFFFPGIGSRSKSSLTKKMQYKNLGRSGLKVSQLSYGAWVSFGNQLDVKEAKALLQCCRDHGVNFFDNAEVYANGRAEEIMGQAIRELGWKRSDIVVSTKIFWGGQGPNDKGLSRKHVVEGTKASLKRLDMEYVDVLYCHRPDSSTPIEETVRAMNHVIDRGWAFYWGTSEWSAQQITEAWAVAQRLDLVGPIVEQPEYNLLSRHKXVESEFLPLYTNYGTGLTT

SEQ ID NO: 11929 - protein, 392 aa, Gaudichaudia mcvaughii
DLEPVNPADVPVTAAGALKSYKLAAKAISRLQSLPSGNISLLCDVLVKEVRDLTGYDRVMMYKFHEDEHGEVVSECCRSDLESYLGLNYPATDIPQASRFLFMKNKVRITCDCLAPSVEVIQDERLTQPLSLCGSTLRSPHGCHAQYMTNMGAIASLVMSVTVNEDDDTMDGDQQHMTRKLWGLVVCHHTSPRFVPFPLRYACEFLIQVFGVQVNKEVELAAQVRERHSLQIQTMLCDMLLREAPVAIITQSPNVMDLVKCDGAALYFKNKTWFLGVTPTEEQIRGIAEWPLKYHSGNTGLSTDGLMEAGYPGASGLGDAVCGMAAVSITSRDFLFWFRSHTAKEIKWGGAKHDPDDKDDLRKMHPRSSFKAFLEVVKWRSTPWEDIEMDAI

SEQ ID NO: 11930 - protein, 167 aa, Saccharomyces cerevisiae
MQEFYSFSPIDENGNPFPFNSLRNKVVLIVNVASHCAFTPQYKELEYLYEKYKSHGLVIVAFPCGQFGNQEFEKDKEINKFCQDKYGVTFPILHKIRCNGQKQDPVYKFLKNSVSGKSGIKMIKWNFEKFVVDRNGKVVKRFSCMTRPLELCPIIEELLNQPPEEQI

SEQ ID NO: 11931 - protein, 139 aa, Triticum aestivum
  unsure (1)..(139): unsure at all Xaa locations
TCESSALLHSIGTNAILVCTRALHEKEESPKGSRQISRSKFFLVALICSFAWYVVPGYLFPALTSISWVCWVFSKSVTAQQLGSGMKGLGLGAFTLDWSAVSSFLFSPLISPFFATXNIFVGYFCFLYVLXPTAYWGMN

SEQ ID NO: 11932 - protein, 128 aa, Brassica oleracea
DPFEGLLTPSSARDMAAFTNARVDWKETPEAHVFKADLPGLMKEEVKVEVEDKNILQISGERSKENEEKNDKWHRLERASGKFMRRFKLPENAKMEEVKATMENGVLTVTVPKAPEKKPEVKSIDISG

SEQ ID NO: 11933 - protein, 336 aa, Streptomyces coelicolor A3(2)
MRYIRLGTTGLEVSAIALGCMGFGEPDRGGEPWSLGADPSRDIIRQALEGGVNFLDTANGYSAGNSEEIVGQAVKDFARREEVVLSTKVWMRMRPGPNGAGLSRKAIFAELDASLKRLGTDYIDLYQIHRWDYDTPIEETLEALHDVVKSGKVRYLGASSMYAWQFAKALYLADLNGWTRFVSMQDHYNLIHREAEREMLPLCADQGIGVIPWSPLARGRLTRARDTATARAGTDEGGRILYRDEDQAVAERVREIAGRRGLSPAQVALAWVMRNPVVTSPIVGVTKPAQLADAIAAVDVGLDEDEAAYLEEPYQPHEAAYLEESFYKARPAAASR

SEQ ID NO: 11934 - protein, 329 aa, Zea mays
MAMVPCGDDTDWCHVLDNFNLLLCSSSCSPNAMANRVGDEYFSDLLAPDADGIDEALLMPFSDIDLQVFDSDDEHRPPVDQMVNMIPPAVLHHPSTAGTQNGGAVHAHQKAMAVIDDSCFRRGASGVEMAVVRHHGEPRQGSSSVAPVPPPSLPGTRARRSDGRSARAGKTTKLDYIGFDELRKYFCMPITRAAREMNVGLTVLKKRCRELGVARWPHRKMKSLKSLMANVQEMGNVMSSVAVQQELAALETYCTLMEDNPWIELTDRTKKLRQACFKERYKRRRAAEVNVMDMDRIYCFGQHHHQQLLPPTTSSSDDRHGQCSRSFGY

SEQ ID NO: 11935 - protein, 484 aa, Streptomyces avermitilis MA-4680
MAVTKSAVASLKREAEGAHAAHEGILRRQSARESAARTYARALPIVPVRARGLTIEGADGRRYLDCLSGAGTLALGHNHPVVLEAIRKVLDSGAPLHVLDLATPVKDAFTTELFRTLPAGLADRARVQFCGPAGTDAVEAAFKLVRTATGRSGLLAFTGAYHGMTAGALEASGGATDGRVARLPYPQDYRCPFGIGGERGAELGARWTESLLDDVKSGVPLPAGMILEPVQGEGGVIPAPDAWLRRMRAITADRSIPLIADEVQTGVGRTGRFWAVEHSGVVPDVMVLSKAIGGSLPLAVVVYRDDLDVWQPGAHAGTFRGNQLAMAAGTATLAYVREHRLAERAQTLGARMLDQLRSLATEFPCVGEVRGRGLMIGVELVRAEEDREAVSPGSGDFASLDTAGAGPRPAAPELAAAVQRECLRRGLIVELGGRHASVVRLLPPLTISDEQATAVLDRLADAVEAVARGRAERSRGFQRSERAG

SEQ ID NO: 11936 - protein, 103 aa, Zea mays
  unsure (1)..(103): unsure at all Xaa locations
MMNREPGDWHCRARQHLNFXRRDACQRCSEPRGVGDRSGGGGHLRGRGGTSFVRVYSAGSDVPPGDWYXFCGAHILDSRSNCLMCSAYIDEADGTCDSDMSRS

SEQ ID NO: 11937 - protein, 357 aa, Glycine max
  unsure (1)..(357): unsure at all Xaa locations
TRPAKLAEDTIPGLTDIVGDEDKAKEIVEAAKASMGRILIFLGLTFASFSVXIFFLLTFSGQDLSPVDLVNVHQFAQRVMDLSEYRRKLYDYLVAKMNDIAPNLASLIGEVVGARLISHAGSLTNLAKCPSSTLQILGAEKALFRALKTRGNTPKYGLIFHSSFIGRASAKNKGRIARYLANKCSIASRIDCFSERGTTTFGEKLREQVEERLDFYDKGVAPRKNIDVMKSAIESVETEYTAMETEAPVEVSGKKAKKKKHKASVTDDGDNMAVDKITETTNGDALEDHKSEKKKKKKEKRKLDLEVELNDQAMDGGANGVESEQDGAVKKKKKKDKRGDNGEVLEAAIETKKKKKK

SEQ ID NO: 11938 - protein, 392 aa, Tetrapterys discolor
DLEPVNPADVPVTAAGALKSYKLAAKAISRLQSLPSGNISLLCDVLVKEVRDLTGYDRVMVYKFHEDEHGEVVSECRRSDLESYLGLHYPATDIPQASRFLFMKNKVRMICDCLAPPVKVIQDERLPQPLSLCGSTLRSPHGCHAQYMTNMGTIASLVMSVTVNDDDDMMDGDQQQMTRKLWGLVVCHHTSPRFVPFPLRYACEFLIQVFGVQINKEVELTAQVREKHILQIQTMLCDMLLRDAPVAIITQSPNVMDLVKCDGAALYFKKKTWLLGVTPMEEQVRDIAEWLLEYHSGSTGLSTDSLMEAGYPGASDLGDAVCGMAAVSITSRDFLFWFRSHTAKEIKWGGAKHDPDDKDDGRKMHPRSSFKAFLEVVKWRSVPWEDIEMDAI

SEQ ID NO: 11939 - protein, 262 aa, Hordeum vulgare subsp. spontaneum
SAESNMCDLLRINTDRGVMIGDGKSRFSIGGKPIYHFVGTSTFSEYTVMHVGCVAKINPEAPLDKVCVLSCGISTGLGASINVAKPPKGSTVAIFGLGAVGLAAAEGARIAGASRIIGVDLNASRFEEARKFGCTEFVNPKDHTKPVQQVLADMTNGGVDRSVECTGNVNAMIQAFECVHDGWGVAVLVGVPHKDAEFKTHPMNFLNERTLKGTFFGNFKPRTDLPNVVEMYMKKELEVEKFITHSVPFSEINKAFDLMAKG

SEQ ID NO: 11940 - protein, 427 aa, Coxiella burnetii
MTELTGVSIVTYQHIKVPSQGEKITVNKAVLVVPDRPIIPFIEGDGIGIDIAPVMKNVVDAAVEKSYAGKRKIEWMEIYAGEKATKVYGKDNWLPDETLEAIKEYQVAIKGPLTTPVGGGIRSLNVALRQQLDLYVCLRPVRYFTGVPSPVKTPEKVNMVIFRENSEDIYAGIEWPAGSPEAVKLINFLQNEMGVKKIRFPETAGIGIKPVSKEGTSRLVRRAIQYAIDNDRDSVTLVHKGNIMKFTEGAFKDWGYEVAVKEFGAKPLDGGPWHVFENPKTGQKITIKDVIADAFLQQILLRPAEYSVIATLNLNGDYISDALAAEVGGIGIAPGANLSDTVGLFEATHGTAPKYAGQDKVNPGSLILSAEMMLRYLGWKEAADLVVQGIEGAIESKTVTYDFARLMTGAKEVSTSQFGKAIIKHIL

SEQ ID NO: 11941 - protein, 158 aa, Listeria innocua
MNVHDFSEKAMNGKEIALSDYKGKVLLIVNTASKCGLTPQLEGLEKMYKKLGGDNFEILGFPCNQFLRQDPGSDEEILEFCQMNYGVTFQMFSKIKVKGKDAAPLYKYLTEQTGGKKVEWNFAKFLIDENGEVVERFPSKMKPEDFEDKVEALVAAVK

SEQ ID NO: 11942 - protein, 346 aa, Escherichia coli CFT073
MKSVVNDTDGIVRVAESVIPEIKHQDEVRVKIASSGLCGSDLPRIFKNGAHYYPITLGHEFSGYIDAVGSGVDDLHPGDAVACVPLLPCFTCPECLKGFYSQCAKYDFIGSRRDGGFAEYIVVKRNNVFALPADMPIEDGAFIEPITVGLHAFHLAQGCENKNVIIIGAGTIGLLAIQCAVALGAKSVTAIDISSEKLALAKSFGAMQTFNSREMSAPQIQGVLRDLRFNQLILETAGVPQTVELAVEIAGPHAQLALVGTLHQDLHLTSATFGKILRKELTVIGSWMNYSSPWPGQEWETASRLLTERKLSLEPLIAHRGSFESFAQAVRDIARNAMPGKVLLIP

SEQ ID NO: 11943 - protein, 151 aa, Photobacterium leiognathi
QDLTVKMTDLQTGKPVGTIELSQNKYGVVFIPELADLTPGIHGFHIHQNGSCASSEKDGKVVLGGAAGGHYDPEHTNKHGFPWTDDNHKGDLPALFVSANGLATNPVLAPRLTLKELKGHAIMIHAGGDNHSDMPKALGGGGARVACGVIQ

SEQ ID NO: 11944 - protein, 495 aa, Aspergillus oryzae
MGGDGWPSDGHILLLIVLTVLTPPSLALYRLWIHPLRSYPGPRWWAIWRGPYILSNIRGNLVRDLQRLHQQFGHVVRIAPNELSFIVPEAASPIYTSNPEFPKDPMHLPPFHNGTPGILAADHAHHRRYRRLLAFSFSDKGLRQQRSLIERSVNLLITRLHENCGQGPLDLTLWFNWATFDIIGDLAFGNSFGCLDNVQTHPWISSIQGNVKLIPILNAFRRYRLDGLLQLLGSRKLLEQRRRNAQFTTDQVDRRLKNSSTPRGDIWDAVLAQKPDGEPPMSREEMISNTSAIVLAGSETSATLLSGCTWLLLKNPGHLHQLTSRIRSQFTHASEIDSQSVSRVEGLQAILEESLRLYPPVPMQSNRIVPQSGAYIAGGWVPGGTSVGLQQFVACRSSSNFHRPEEFLPERWQGQGEFAHDRREVSQPFSIGPRNCIGRQLAYVETRLILVKLLWHFDLRLDTTRMKDTDWLAEQGIWILWDKNPLWVNLEPRNE

SEQ ID NO: 11945 - protein, 532 aa, Oryza sativa
  unsure (1)..(532): unsure at all Xaa locations
EKENNSGLPIYIHVDKSTSXSANLHSAXQHTPSMDSSMPXXALLLALLIPTLLRFVIRRKYSSYNLPPGSLGFPLIGQSISLLRALRSNTDYQWYQDRIKKYGPVSKMSVFGSPTVLMAGPAANHFVFSNQDLIFTQXXKAINTIIGRSILTLSGDELKQVRSALQGYLSPEMVTKYMRKMDEEVRRHIDLNWVGHKTIKVAPLAKRLTFDIICSVVFGQGAAPFREALAIDFEKVVRAALSIPVNIPFTKFNKGLSASRRIRKVLRQIAREREAALQQGHSSSADDFFTYMLVLRSEGTHSLTVEDIVDNAIVLLTAGYGNSAVLITFLLRYLANDPDILGKITEEQEEIARRKGPNEPLTWDDVSRMKYTWKVALETLRTVPPIFGSFRTAVKDIEYHGYHIPKGWQVFTAQRITHLDGNFFNDPVKFDPTRFDNHTSIPPYCFVPFGGGPRMCPGNEFARTEILVTMHYLPPTWXXFLLLRWRSPSSSRSSSPSXVTPLAVHLAGRARRASPRRCNLPPGIDGPSMARP

SEQ ID NO: 11946 - protein, 362 aa, Sulfolobus tokodaii
MHLYSFSTSIICVHKTAFVWDDRYLNYSFPGNHPFKSLREAMTKKLLEERGAFHEIDIVPPKVISEELLSLIHTKEYIEFIKRKSEEGSGLLDEGDTPAFKGIFEAALIRVSGTVTAVELLQSYDHTINIGGGFHHAKRSQASGFCVFNDVALAIKLAERSFKKIALVDIDGHHGDGTQYLLYDDPKVLKVSLHMFHPRFFPGTGDEYEIGSGEGKGMTINIPLPPGTGDDMYLYAFNEIVVPKIKEFKPDLIFLLNGGDSYYEDPLVELKLSTKGYLEVVRTVHSLAHQFANGKLVMTGGGGYNYEATARIWALSIAEIAGLDFTEFETLEDCCLIASSEFVKKRVLEIVDKLKKIHGLSN

SEQ ID NO: 11947 - protein, 127 aa, Zea mays
MAKYNVVQKNKRQCNQDRKRAAHGEPGTGKLKQRTAPVSMSGKRKKKLERRLNRKEAAMIKALENNMGDVDMISVEGSSEAAKGKSQVKFSVKKNSRIQIKRLKGKGRKKAKNAKPPAKERVDAMVE

SEQ ID NO: 11948 - protein, 66 aa, Glycine max
MYQMMGQVNKERLAEYLGELQRKEDTNDRYVAALRGETLTRKPYVRIQPIPEQTDTKANKEQKKMN

SEQ ID NO: 11949 - protein, 256 aa, Escherichia coli K12
MKCFTLSSQRRRIIGIPIFCTSIFLIFFSVCCFFTLFAAIAHKTVLFCILKDLHKANNAPKVISKSFIAEVSMSDVLRPYRDLFPQIGQRVMIDDSSVVIGDVRLADDVGIWPLVVIRGDVHYVQIGARTNIQDGSMLHVTHKSSYNPDGNPLTIGEDVTVGHKVMLHGCTIGNRVLVGMGSILLDGAIVEDDVMIGAGSLVPQNKRLESGYLYLGSPVKQIRPLSDEEKAGLRYSANNYVKWKDEYLDQGNQTQP

SEQ ID NO: 11950 - protein, 796 aa, Talaromyces emersonii
MMTRTAILTALAALLPTATWAQDNQTYANYSSQSQPDLFPRTVATIDLSFPDCENGPLSTNLVCNTSADPWARAEALVSLFTLEELINNTQNTAPGVPRLGLPQYQVWNEALHGLDRANFSDSGEYSWATSFPMPILSMASFNRTLINQIASIIATQARAFNNAGRYGLDSYAPNINGFRSPLWGRGQETPGEDAFFLSSAYAYEYITGLQGGVDPEHVKIVATAKHFAGYDLENWGNVSRLGSNAIITQQDLSEYYTPQFLASARYAKTRSLMCSYNAVNGVPSCSNSFFLQTLLRESFNFVDDGYVSSDCDAVYNVFNPHGYALNQSGAAADSLLAGTDIDCGQTMPWHLNESFYERYVSRGDIEKSLTRLYANLVRLGYFDGNNSVYRNLNWNDVVTTDAWNISYEAAVEGITLLKNDGTLPLSKKVRSIALIGPWANATVQMQGNYYGTPPYLISPLEAAKASGFTVNYAFGTNISTDSTQWFAEAISAAKKSDVIIYAGGIDNTIEAEGQDRTDLKWPGNQLDLIEQLSKVGKPLVVLQMGGGQVDSSSLKANKNVNALVWGGYPGQSGGAALFDILTGKRAPAGRLVSTQYPAEYATQFPANDMNLRPNGSNPGQTYIWYTGTPVYEFGHGLFYTEFQESAAAGTNKTSTLDILDLVPTPHPGYEYIELVPFLNVTVDVKNVGHTPSPYTGLLFANTTAGPKPYPNKWLVGFDRLATIHPAKTAQVTFPVPLGAIARADENGNKVIFPGEYELALNNERSVVVSFSLTGNAATLENWPVWEQAVPGVLQQ

SEQ ID NO: 11951 - protein, 450 aa, Streptomyces avermitilis MA-4680
MTVNAKSSASAGNTWRDLPAAQQPEYPDAEALRDVIADLESYPPLVFAGECDQLRARLASVAKGEAFLLQGGDCAEAFDGVSADHIRNKLKTLLQMGAVLTYAASVPVVKVGRIAGQYSKPRSKGTETRDGVTLPTYRGDSVNGFDFNEKARIPDPERLKRMYNASASTLNLVRAFTTGGYADLRQVHAWNQDFVKSSPSGQRYEQLAREIDNALNFMRACGTDPEEFKTVEFYASHEALLLDYESALTRVDSRTGKLYDVSGHMVWIGERTRQLDGAHIEFASKIRNPIGIKLGPTTTAEDALQYIERLDPDREPGRLTFIVRMGADKVRDKLPELVEKVTASGATVAWVTDPMHGNTFEAASGHKTRRFDDVLDEVKGFFEVHKGLGTHPGGIHVELTGDDVTECVGGGDEIFVDDLHQRYETACDPRLNRSQSLDLAFLVAEMYRDQ

SEQ ID NO: 11952 - protein, 350 aa, Listeria monocytogenes EGD-e
MRAAVLYENNVIKAEQIDEATCGKDQVRVEVKAVGICGSDIHKMQTRWKYPLPAVMGHEFAGVITEIGSEVTNVAMGDRVAGIPLEPCMECNYCKAGDFALCDNYRMVGSHFHGGFAENVVMKADNVISIGDLDFEEGAMIEPLAVSMHGVLGIQPRLGDTVIVFGIGTIGILVVQCLLLAGVKDIIAVDISDKKLADAREFGCKYTINPKNEDLKERVFAYTNGLGADIALECAGSKITQEQCLLVTKKKGKVGFLGIAYADVLLHEEAFENIFRRELTLKGFWNSYSAPFPGEEWRTSIEFVKQGRIKLKPLISHRYKLEETKEAFDMILSREHDYNKVMILPQKGDD

SEQ ID NO: 11953 - protein, 504 aa, Corynebacterium efficiens YS-314
MVYFRSCSHISPGDAKKPLWRMSLHAALSCRNGLRLPGFPRTPSLVLPQTGVPGHPPRPVPPHRGPGSSVSIVGMSRPSPSRSPWTVHRGPYTVHHGPPGNPPNPGVDVTMVSVTTKILILGSTGSIGTQALEVIADNPDLFTLVGIAAGGSNPGLVIEQARAFNLRPHQVAVAGKQAAGEVGEALGGTVIDGPDAAQTLVESVQATDPADAVLNALVGSMGLGATLATLRSGAHLALANKESLVAGGEFVMAQARPGQIIPVDSEHSAMAQCLRSGTEGEVARIVLTASGGPFRGWTREQMWEVTPEQAAAHPTWSMGQMNTLNSATLINKGLELIEATLLFDTDADLIDVTVHPQSIIHSMITFRDGCTIAQASPPSMKLPIALAMNWPHRVPGAQPALDFTQAHTWTFEPVDDAAFPAVQLARDVAKQKGTFPAVYNAANEEAAAAFLAGRIRFPQIVDVVSEILQGASQFAGVSSDVDDILATESEARARANQLIDRLAR

SEQ ID NO: 11954 - protein, 210 aa, Zea mays
TSRPAGNNSRRQRPRTTTTSKMVNLRTQKRLAASVVGCGKRKIWLDPNEVSEIANANSRQTVRKLVQDGLIIRKPVTMHSRARARELNAARRIGRHRGFGKRKGTKDARMPSQIVWMRRLRVLRRLLVKYRAAGKIDKHLYHELYLLSKGNTFKHKRALVEHIHKAKAEKARERVIKEEMDAKRAKTKAARERRQERIQQKRQAQLGDEE

SEQ ID NO: 11955 - protein, 815 aa, Xylella fastidiosa Dixon
MERRTARHRPQRLRHSISPSHWPGSKLEHRPTATLGTVTSTEARAKFNLTGGPGKDHPRYAGLTLWSPNINIFRDPRWGRGMETYGEDPYLTSQLAVSFIRGLQGNIPDHPRTIATPKHFAVHSGPEPGRHSFDVDVSAYDLEATYTPAFRAAIVDGHAGSVMCAYNALHGTPACASDWLLNTRLRNDWGFNGFVVSDCDAIEDMTRFHFFRQDNASASAAALKSGDDLNCGNTYRDLNQAIARGDIDESTLDQALIRLFTARQRLGTLQPREHDPYAAIGIKHIDTPAHRALALQAAAQSLVLLKNSGNTLPLTPGTTLAVLGPDADSLTALEANYQGTSSTPVTPLIGLRTRFGTAKVHYAQGASLAPGVPSTITETALRNHGHPGLKGEYFDTIDFSGPPHLVRQDRIIAFNWDHVAPAPGMNPHRYAVRWTGELLPPGPGTYTFAVHVARCFDCNGHDPVRLYIDDRQIIPDNATAAQATTAPQQTDNTHLEATLHFTDTRPHHIRLDMEHRGEDQGVRLEWLAPEAPQLAEAERAVAHADAIVAFVGLSPEVEGEELHIDTPGFSGGDRTTIDLPATQETLLQHVKTTGKPLIVVLMSGSAVALNWAQHHADAILAAWYPGQSGGTAIAQALAGDVNPGGRLPVTFYRSTQDLPPYISYDMTGRTYRYFKGQPLYPFGYGLSYTQFAYEAPQLSTATLKAGDTLTVTAHVRNTGTRAGDEVVQLYLEPPHSPQAPLRNLVGFKRVTLRPGESRLLTFTLDARQLSSVQQTGQRSVEAGHYHLFVGGGQPNTGAPGGTAAFSIIGRALLPK

SEQ ID NO: 11956 - protein, 104 aa, Halobacterium sp. NRC-1
MEFCDDCGSMMKADDELWVCSSCGHKQPKDPSASFVVTEGQEETEVVDVSDAQDRGLPTTSVVCPDCDNDEAHWYMQQIRSADESETRFFICTECEHRWREDDN

SEQ ID NO: 11957 - protein, 143 aa, Anisocarpus madioides
RPGAVEKVLSAITKMKPKIVTLVEQESNHNGALFMERFNEALHYYSTMFDSLESSALTLPNSPDDLVMSEVYLGRQICNVVACEGTDRVERHETLTQWRVRMNSAGFEPVHLGSNAFKQASMLLALFADGDGYRVEENDGCLM

SEQ ID NO: 11958 - protein, 299 aa, Triticum aestivum
  unsure (1)..(299): unsure at all Xaa locations
SKTTRIKXIRRGTPDAGFPLFETESLKWPGFVEFDDVNGKVLTYSAQDSTYKVFDLKNYTLLYSISDKNVQEIKISPGVMLXIYTRTSGSIRLKILNIEDGTVLKFFNHLLHRNKKVDFIEQFNEKLLVKQDGENLQILDVRNFQLTEVSSTEFMTPSAFIFLYELQLFLTFRNRSVAVWNFRGELVTSFEDHLLWHPDCNTNNIYITSDQDLIISYCKADSTDSSSEENAGSINISNILTGKCLAKIKAGNFNEQKKTWKFQNTITEALEDITALYYDEERDEIYTGNRHGLVHVWAN

SEQ ID NO: 11959 - protein, 797 aa, Hypocrea jecorina
MVNNAALLAALSALLPTALAQNNQTYANYSAQGQPDLYPETLATLTLSFPDCEHGPLKNNLVCDSSAGYVERAQALISLFTLEELILNTQNSGPGVPRLGLPNYQVWNEALHGLDRANFATKGGQFEWATSFPMPILTTAALNRTLIHQIADIISTQARAFSNSGRYGLDVYAPNVNGFRSPLWGRGQETPGEDAFFLSSAYTYEYITGIQGGVDPEHLKVAATVKHFAGYDLENWNNQSRLGFDAIITQQDLSEYYTPQFLAAARYAKSRSLMCAYNSVNGVPSCANSFFLQTLLRESWGFPEWGYVSSDCDAVYNVFNPHDYASNQSSAAASSLRAGTDIDCGQTYPWHLNESFVAGEVSRGEIERSVTRLYANLVRLGYFDKKNQYRSLGWKDVVKTDAWNISYEAAVEGIVLLKNDGTLPLSKKVRSIALIGPWANATTQMQGNYYGPAPYLISPLEAAKKAGYHVNFELGTEIAGNSTTGFAKAIAAAKKSDAIIYLGGIDNTIEQEGADRTDIAWPGNQLDLIKQLSEVGKPLVVLQMGGGQVDSSSLKSNKKVNSLVWGGYPGQSGGVALFDILSGKRAPAGRLVTTQYPAEYVHQFPQNDMNLRPDGKSNPGQTYIWYTGKPVYEFGSGLFYTTFKETLASHPKSLKFNTSSILSAPHPGYTYSEQIPVFTFEANIKNSGKTESPYTAMLFVRTSNAGPAPYPNKWLVGFDRLADIKPGHSSKLSIPIPVSALARVDSHGNRIVYPGKYELALNTDESVKLEFELVGEEVTIENWPLEEQQIKDATPDA

SEQ ID NO: 11960 - protein, 258 aa, Sinorhizobium sp. NGR234
MTKTAVITGSTSGIGLAIAKAFAKTGANIVLNGFGSADEIRTVTDEVAGLGAGTVLHHPADMTKPAEIADLMATAVARFGGADILVNNAGVQFVEKIEDFPVEQWDRIIAINLSSSFHTIRAAIPAMKQKGWGRIVNIASAHGLVASPFKSAYVAAKHGIMGLTKTVALEVAENGITVNSICPGYVLTPLVEKQIPDQARTRGITEEQVINEVMLKGQPTKKFITVEQVASLALYLASDEAAQITGTHVSMDGGWTAQ

SEQ ID NO: 11961 - protein, 422 aa, Xenorhabdus nematophila
MRPSDIEFDLRHIWHPYTSMIRPFPAYPVVSATGVELVLSDGRKLIDGMSSWWAAIHGYNHPVLNEAAKSQIDKMSHVMFGGITHPPAVELCKQLVALTPDSLECVFLADSGSVAVEVALKMALQYWQARGEKRQRFLTLRHGYHGDTFGAMSVCDPDNSMHSLYNGYLPNHLFADAPTCQFDDEWQPEDIDSFKRLLRQYHAEITAVVLEPIVQGAGGMRIYHPEYLRQVRQLCDEHQILLIADEIATGFGRTGKLFACEHAQIEPDILCLGKALTGGYMTLSATLTTRHVAEIISQGEAGCFMHGPTFMGNPLACAVASASLKLLSESSWQQHIQSIETQLKTELLPLKIHHSVKDVRVLGAIGVVEMKQPVDVASLQRHFVQQGVWIRPFGRLIYLMPPYIIQSEQLSQLTTAIVDAIN

SEQ ID NO: 11962 - protein, 424 aa, Rhodopseudomonas palustris
MTNSELLTRRQTAVVRGVSQATPVFAERALNSEIWDVEGKRYVDFAGGIAVLNTGHCHPRIVAAIREQLDRFTHTCFQVAPYEGYIRLAERLNQLAPINGPLKSILLSTGAEATENAVKIARAATGRSGVIAFTGGFHGRTAFASAMTGKVIPYKKALGPPLPGVWHVPFPVAGSDVSVEDALRCVQFVFKADIDASQVAAIIIEPVQGEGGFHQAPPELMRGLRRLCDENGIVLIADEVQTGFGRTGKMFAMEHYDVQADIVCVAKSLAGGLPLSGVIGRAAIMDAAEPGGLGGTYAGNPLACAAALAVLDVFEEENLIARANQIGERLRSAIDRFALSNTLVPTSVARGPGAMVAFDILKQRGSNEPDAEATKRVTRLAHENGLILLSCGTAANTIRILVPLTASDAIVDEGLAILERCLAA

SEQ ID NO: 11963 - protein, 392 aa, Corynebacterium glutamicum ATCC 13032
MGVVTKKILILGSTGSIGTQALDVIADNSDKFEVVGIAAGGSQPDLVISQAQQLGLAADKVAVADAQAAAVISKALGGEIISGTDAAKILVETTKADTVLNALVGSLGLAATLATLESGAHLALANKESLVAGGEFVTSKAKLGQIIPVDSEHSAMAQCLRSGTRDEVARIVLTASGGPFRGWTREKMWEVTPEQAAAHPTWAMGQMNTLNSATLINKGLELIEATLLFETDADLIDVTVHPQSIIHSMITFTDGATIAQASPPSMKLPIALALDWPHRVPKAQPALDFTAAHTWAFEPVDDAAFPAVQLARHVAKQKGTYPAVYNAANEEAAEAFLRGRIKFPQIVDVVDEVLQGASQFAGVASHVDDILATESEARARANALINRLATNL

SEQ ID NO: 11964 - protein, 89 aa, Oxalis polyrhiza
LYAGINISGTNGEVMPGQWEYQVGPSVGIEAGDHIWASRYILERITEQAGVVLTLDPKPIDGDWNGAGCHTNYSTKSMRDEGGFEVIKK

SEQ ID NO: 11965 - protein, 504 aa, Listeria monocytogenes
KPLANLKNLGWLFLDENKVKDLSSLKDLKKLKSLSLEHNGISDINGLVHLPQLESLYLGNNKITDITVLSRLTKLDTLSLEDNQISDIVPLAGLTKLQNLYLSKNHISDLRALAGLKNLDVLELFSQECLNKPINHQSNLVVPNTVKNTDGSLVTPEIISDDGDYEKPNVKWHLPEFTNEVSFIFYQPVTIGKAKARFHGRVTQPLKEVYTVSYDVDGTVIKTKVEAGTRITAPKPPTKQGYVFKGWYTEKNGGHEWNFNTDYMSGNDFTLYAVFKAETTEKAVNLTRYVKYIRGNAGIYKLPREDNSLKQGTLASHRCKALTVDREARNGGKLWYRLKNIGWTKAENLSLDRYDKMEYDKGVTAYARVRNASGNSVWTKPYNTAGAKHVNKLSVYQGKNMRILREAKTPITTWYQFSIGGKVIGWVDTRALNTFYKQSMEKPTRLTRYVSANKAGESYYKVPVADNPVKRGTLAKYKNQKLIVDCQATIEGQLWYRIRTSSTF

SEQ ID NO: 11966 - protein, 2640 aa, Nodularia spumigena
MPSPQTNKLIETPLDEPFLGEHNQAEALKKSLSFGGEIEDSFRTLPEVLVDAACHESKGITYIKNDEIEYFQTYKDLYHEALTILHGLAHHGIKFGDKVIFQIGRNQDFIPALWACFLGGIIPAPLSVAPNYDPENAAVKKLYNVWQILEQPIILSDCELIGEIEKLANQPHLEGLRVLSIDDLRSNQSHPESAVIPQLTPQEPALLLFTSGSTGLPKGVMLHHRNLLSMSAGTVRMNNFTQAEVTLNWMPLDHVGAIVFLGIMAVDLACNQIHVPIELILRQPLKWLDLIQKHQVTISWSPNFAFSLINQQSEELKRCCYNLSSMKFLVNAGEQVSAKTIRLFLELLAKHQLQDGVIKPAFGMTESCSGITWSAGLSKDELQQENSFISLGKPIPGATIRIIDQENHVLPEKEIGRLQIKGFSVTEGYYHNPELNQEVFQDGGWFTTGDLGYLHNGELFITGREKQEIIINGINYFAHEIETTIEELDGVAISYTAAFAVFDQNREVDLLVINFSPKSNNFEDWVKLVREIRSHLTQKLGIAPSYVIPLEAALVPKTSIGKVQKAKLKKDFEQGLFTTRIQEINEYLVKERNKTQSLPQSENERQIAAVWCEVLQLSSVGLHDNFFELGGHSLYLIRVQNLLEKLFERQLPLAEMFKNSTVATLANFLTEPSNSTKATEQKSRQRAENRSRRSHDSHDIAIIGMAGRFPGANNLQTFWENLKNGVETISFFSEAELLASGVSPELFNQPNYVKARPIIDQAEYFDSEFFGYTDREAELLDPQQRLLLQSSWECLENAGYNSNSYQGAIAMFAGASMNTYFINNCYPHRGQLDSTDELQPFTLDSMGGFQTMVANDKDYLTMRISYKLNLRGPSVNVQTACSTGLAVVHLACQSLLSGESDMALAGAASVHSPQKIGYLYQEGAIISPDGHCRAFDAQANGTIFGSGIGVVLLKRLKDALVDNDHIYAVIKGSALNNDGGTKLGFAAPGGEGQTSVAMEALAFAGVEADTIGFVEAHGTGTKLGDPIEVDALAKAYSAAQPGDCALGSVKTNIGHIQIASGIVGLIKTALALKHQIIPPTLHFNTPNPQIDFSQTPFYVNTEAIPWTAKQREGKELPRRAGVNSLGIGGVNVHVVLEEAPAIIPQPNAIQRPHHLLKLSARTEQALIDLAKSYGEFLENHPESDISNVVFTANTSRVQFSHRLAVTGDQISDFVTKLRQFVQQDVESVIQGQVDAKKPPKIAFLFTGQGSQYLGMAAQLYQSQPTFRQTLDKCETIYQELTGKSLLQVIFANSDAALNHTSHTQPALFVVEVALAQLWRSWGIQPTAVLGHSLGEYAAACFAGIFDIETGLKLVTKRAHLIGELPAEQGAMAAIFVSENSILQVCQSLGIKVAMPAAGVAIAAINAAEHTVISGEKPIIQDLCQHFTNAGVKVRQLKVSHAFHSPLIAPVCEEFKNTLQEIDFAKPQIPIISNLTGEVADDSIVTPEYWIQHLLHTVQFHQGVLSLQSLGCDTFIEIGPQPVLLGIVATSISEPLILPSLRSGISDWEVLLQSLGKLYVRGAEIDWFGVEQDYQSRRCPLPTYPFQQRRHWMSLKSQLPTDSEESAVVKMLSQNDPKSLMQALLETGNYSEGEKQTLSTIVQQLIKLHHQDRDNFTFNNLLYQVEWLPYALSTRKLQNLEKLQTDLDSYLGEKIKSAQITGVALAFSEMEKLSVDFIVKALKDLGLWQINTILSPESSFIQAGIKEEQRLLWNHCLKILGEAGIIEKHGNDWKIISESPQAHPDLTVDDLIFQYPNALVELTLFRRVAANLADILTGKIAPLSILFPQHGQIGAAQFYKETSWAKVLNLGISQTVELLLSNYAPLEPIRILEIGAGTGGTTHQVLKACASHQISYTFSDISPFFLETAKDTFAQFSCIDYKVLDIEKDPELQSFLPSSYDLIIAANVLHSTRDLQGETLPHIRGLLRPGGHLLLLELTHQSRWIDLIFGVAQGWWRFSEANLRPDHPIITASTWKSILLESGFAQAEFVSPDAEIGSPLFQQSIIVAQNTENDLSGDWLIVTDNQQNLPLAIQAHLIKDHSSCAIASPENSSELETWLANSPSPRGIIYLVSDRHHQPESILCDRCSYLLNLLQAIQKIPNPPKLFLVTAGGQPFGLEKPSFLTQSPLWALGRVIALEEPELWGGMIDLDPNADMAQNLAALLPALTNSAREDHLLFRNEQAYVARLVPQESLPPKPVTIQAQATYLITGGIGHLGLELARHLVDLGAKNLILTTRRQFPPRTEWGSQVEFSAIIQTLITLEAHGASVEICQADVGDFQQMSDIFENIQKTSSPLRGIFHLAGVSGRKARLSECTFDDIEDVFQAKVRGSWNLHQLSLKTELDYLVFFSSAGAIWGAKEQGLYDAASHFMDALAHLRSRQGLPATSLNWALLAGNGIVSPEYEDWLKQIGMKEIALEPAFRAMNAIMASGKTQVLLADVDWVRFKNIYQFHGNKPLLEQLGELPIPVKSEKASSSSRRFIEEQPPGERREHLFAYIGKQVATILGIKQMPDPDQGFLAMGIDSLLSIELKNRLEKGLEVSLPASLIFDFPNITRLVDYLVEQVFGWGVNAVVEAAPIEQEVNEDLILQELADLEAFLGNY

SEQ ID NO: 11967 - protein, 426 aa, Pseudomonas syringae pv. tomato str. DC3000
MSQTNESLMQRRHAAVPRGVGQIHPIFAASAKNATVTDVEGREFIDFAGGIAVLNTGHLHPKIVAAVQEQLTKLTHTCFQVLAYEPYVELCEKINAKVPGDFDKKTLLVTTGSEAVENAVKIARAATGRAGVIAFTGAYHGRTMMTLGLTGKVVPYSAGMGLMPGGIFRALYPCELHGVSVDDSIASIERIFKNDAEPRDIAAIIIEPVQGEGGFYVAPKAFMLRLRELCDKHGILLIADEVQTGAGRTGTFFAMEQMGVAADLTTFAKSIAGGFPLAGVCGKAEYMDAIAPGGLGGTYAGSPVACAAALAVLDIFEEEHLLERCKTVGERLVTALKGMQAKYPVIGEVRALGAMIAVELFEDGDSHKPNAAAVAQVVAKARDKGLILLSCGTYGNVLRVLVPLTAEEELLTRGLAILDECFAEIA

SEQ ID NO: 11968 - protein, 632 aa, Zea mays
MLDHLAIIASELGDDATDFEVDGIDNLSENDVSDEEIDADELARRMWKDKVKLKRIRERQQKLALQRLELEKTKTKKISDQALRKKMTRAQDGILKYMLKLMEVCNARGFVYGIIPEKGKPVSGASDNIRAWWKDKVKFDKNGPAAIVKYELENSMLSNPKGGGAMDQHSLMDLQDGTLGSLLSALMQHCSPQQRSYPLDKGVPPPWWPTGNESWWPALGLPKGEAPPYRKPHDLKKVWKVGVLTGVIKHMAPNFDKIRNRVRKSKCLQDKMTAKESLIWLGVLQREEKSVHGFGSALLQNARHSSTSEDRNEGIYSSSDEYDVDRLEQPPRSTSSKEDEGDAHPVLQIRGEQTSTRGTNKRRRHDTSSNQLAISKEEMSKSKSQQRKGPSTRPPVAEVEVEVTQRNDKTPEVVCSAAGGDMNFIDPIDAVGITNLPMSPKHVPPTIGALQQHGDCRGNFLSPAAAINYNSSNSNQAASAAQSNTYLGGHPLACEGSDIANSWSGHSFQQDVGLGPPIGFDPSPVAHQGSAVQQPLPLPLPLPMDHQAPITGSGALATNGSYSLPTAGGVSSGTIVSETHQQLMDNPFFGDAGDSSFGGLPFSLLPFSSPMLNFDELDELVDDDDLMQYLGT

SEQ ID NO: 11969 - protein, 180 aa, Zea mays
KSARISMANSRQNIRKLVKDGFIIKKPQKIHSRSRARRAHEAKQKGRHSGYGKRRGTREARLPTKILWMRRMRVLRRLLRKYREAKKIDKHMYHDMYMKVKGNMFKNKRVLMESIHKSKAEKLREKTLSDQFEAKRAKSKASRERKIARREERLAQGPREPTAPVSATAPTAGAPKKAKK

SEQ ID NO: 11970 - protein, 400 aa, Pseudomonas fluorescens
MEDLLKRVLKCEALQQPQWSEPSQLHDAQAYLRDSASLIRVEDILVLRATLARVAAGEAMIIQCGDCAEDMDESAADHVTRKAALLDMLAGTFRLVTQQPVVRVGRIAGQFAKPRSNHSERIGDVELPVYRGDMVNGRDAVLGHRQHDAQRLVRGYRAAQDIMQHLGWKEPSGQEQLTGSPAWTSHEMLVLDYELPQVRRDEQGRTFLGSTHWPWIGERTRQLTGAHVALLSEVLNPVACKVGPDITQDQLLSLCERLDPRREPGRLTLIARMGAHKVADRLPPLVEAVRRAGHKIIWLSDPMHGNTIVAPCGNKTRMVQTITDEITAFKHAVVSAGGVAGGLHLETTPDDVSECASDAAGLGQVGSHYKSLCDPRLNPWQAITAVMAWKACPPPSFVSL

SEQ ID NO: 11971 - protein, 363 aa, Buchnera aphidicola (Pemphigus spyrothecae)
MTKIYNLAILPGDGIGPELLQKDLNFKVLKEQYKLKINTTEYDIGGIAIDKYGKALPKETLDGCKESDSILFGSVGGPKWQHLPPDQQPERAALLPIRKYFNLFSNLRPAKLYSTLNHLSPLRRDISEKGFDILCVRELTGGIYFGKPKGYIKNIIDKKAFDTEIYYASEIKRIAHIGFKLAQNRKYKITSVDKANVLESSVLWRETVNTISKEYPDVKLSHLYIDHAAMQIIKNPDKFDVILTSNLFGDILSDECAMITGSIGMLPSASLNDSNFGLYEPAGGSAPDIAGKNIANPIAQILSIAMLVRYTMKLPMISDHIESAVIDTLKKGYRTLDIANDKEKYVSTNDIGDIISDILKKRI

SEQ ID NO: 11972 - protein, 110 aa, Saccharomyces cerevisiae
MLSFCPSCNNMLLITSGDSGVYTLACRSCPYEFPIEGIEIYDRKKLPRKEVDDVLGGGWDNVDQTKTQCPNYDTCGGESAYFFQLQIRSADEPMTTFYKCVNCGHRWKEN

SEQ ID NO: 11973 - protein, 322 aa, Heliobacillus mobilis
MRFLVTGGAGYIGSHTVLALQAAGHDVVILDNLTTGHAYLVPDGVPFYQGDVGDSSLLEKIFHDYPIDGVLHFAAKSLVGESMQDPGKYFLANTSQSAVLLSAMAKHKIPYFVLSSTAAVYGEPQDVPIPESHPIRPTNPYGLSKHLIEQMLPWFEKVHRMKWMALRYFNVAGADPQGRSGESHDPETHLIPNILKVAQGHRDFVSVFGNDYPTEDGTCIRDYIHVSDLADAHVLAIEALFSGKPSGVCNLGNGQGFSVLSVIESARRVTGHPIPVRIEPRRPGDPAVLVASNAKAVAELGWKPKFTDLSTIVETAWLWQHR

SEQ ID NO: 11974 - protein, 197 aa, Oryza eichingeri
GQTPVFPRILGHEAGGIVESVGEGVTELAPGDHVLPVFTGECKECAHCKSEESNMCDLLRINVDRGVMIGDGQSRFTIKGKPIFHFVGTSTFSEYTVIHVGCLAKINPEAPLDKVCILSCGISTGLGATLNVAKPKKGQTVAIFGLGAVGLAAMEGARLSGASRIIGVDLNPAKFEQAKKFGCTDFVNPKDHSKPVH

SEQ ID NO: 11975 - protein, 395 aa, Bacillus halodurans
MPKVGGEHEYVHRAMGGKAAFLASWAITLGYVSVVAFEAVALPTVIEYIFPNYQVGYMWTIAGWDVYASWVLVGVAGSIFVIAINYFGLKPAAKIQVILTLSIILIGLMLVFGSAVGGEAANFEPLFVNGATGIMAVLIMVPFLFIGFDVIPQTAEEANIPARDIGKLLIFSVFCAIVFYILIAIGVVSALDANALEVTQLATADAMSALFGSTFFGHLLVVGGVAGIMTSWNAFIIGGSRVMFAMAQSGMLPKWFGRLHPKYRTPSNAILFIGGLAVLSPLLGRPALVWFVDSGGPAIVIAYLMVAIAFLLLRKNEPAMERPYQSGRSSIVGWIALVLSIGFLIIYLPGMPAALTGPEWVIFVGWFLIGLYFFVQMSKGKYKENENEKTSDQAM

SEQ ID NO: 11976 - protein, 404 aa, Leuconostoc mesenteroides subsp. mesenteroides ATCC 8293
MPYLQHVMACALFILQIQSPIPVLLSQFEVYHMTLFPNYQRAPLTFKKTKNATWTDGKNNEYTDLSSGIGVYNVGANNDAVESALIAQAKEIWHLPNLYENELQETVAAKLGGEDYTTYFANSGAEANEAAIKLARLVTKRETIITFKNSFHGRTYGAMSATGQDSIHYGLPMLDGFQYAEFNDINSLKELLNKDVAGVMLELVQGEGGVIPAHQDFVTELIQVVHDNGSLVMIDEVQTGMGRTGKKFAFENYHFQPDIFTNAKALANGVPVGAMLAKNEFASSFSYNAHGSTFGGNPLAMSAASATLDELSLILPNISEKINLFWQELAAFKELRNVVEVRGLGMMAGIELNIPVKQVVADLLDEKIVTLGAGHNTLRLLPPLTISESQLTTALQKIKQLLSQ

SEQ ID NO: 11977 - protein, 117 aa, Glycine max
  unsure (1)..(117): unsure at all Xaa locations
LSFVASYSLTANYIPVLAYGSAGMPPASSCQFFQGGKLTGMNFNYFVTRYNKRWWQKFNYALSAALDAGTAFMGAXIFFALQNAGHNXKRWGSESDHCPLSTRPTSSXIEVDGCPSI

SEQ ID NO: 11978 - protein, 363 aa, Campylostemon angolense
QSQKLAVRAISQLQSLPGGDIKLLCDTAVESVRNLTGYDRVMVYKFHEDEHGEVVAESRRPDLEPYIGLHYPATDIPQASRFLFKQNRVRIIVDCHASPVSVIQDDGLMQPLCLVGSTLRAPHGCHAQYMENMGSIASLAMAVIINGNDEDGIGGRNPTRLWGLVVCHHTSVRCIPFPLRYACEFLMQAFGLQLNMELQLAAQLLEKHVLKTQTLLCDMLLRESPTGIVTQSPSIMDLVKCDGAALYYQGNYYPSGVTPTEAQIKDIVNWLLAFHGDSTGLSTDSLADAGYPGATLLGDAVCGMAVAYITNRDFLFWFRSHTAKEIKWGGAKHHPEDKDDGQRMHPRSSFKAFLEVVKSRSLP

SEQ ID NO: 11979 - protein, 186 aa, Zea mays
MSATPLPPPGPDGAVALLPPPGTDMTGICFRDQLWLDTYPLDRNLVFDYFALSPFYDITCNNESLRSRQIHPLDMSLRLCCGRTKMTGMEYLLSEVMEPHLFVIRKQKRESPEKSSPMLAYYILDGSIYQAPQLCNVFASRISRAMHHIVYPLLFFLMFCSGILGCTIFLIGNAVKMVYTHFLLLD

SEQ ID NO: 11980 - protein, 147 aa, Triticum aestivum
  unsure (1)..(147): unsure at all Xaa locations
LLVSVTVGPWISHCELLAFVRMPSSEFSRICKDLSSIGDTVIISVTKEGVKFSTAGDIGTANIVCRQNKTVDKPEESTIIXEMQEPVSLTFALRYMNSFTKASPLSDQVTISLSSELPVVVEYKIGEMGYIRFYLAPKIEEDEEMKA

SEQ ID NO: 11981 - protein, 481 aa, Triticum aestivum
RHPPPPPPPQEVEPGAATYRGRRGYAPPPSPPPGGKLLPPPPPALAHRPPLAPPPPPPPWLVCGGGSVAPCSGGEILPPPSPGTALGFTNSKSTFTYDELVRATDGFSDANLLGQGGFGYVHKGVLPNGKEIAVKQLKLGSGQGEREFQAEVEIISRVHHKHLVSLVGYCISGGKRLLVYEFVTNNTLEFHLHGKGRPTLEWPIRLRIALGAAKGLAYIHEDCHPKIIHRDIKSSNILLDFKFEAKVADFGLAKFTSDNNTHVSTRVMGTFGYLAPEYASSGKLTEKSDVFSFGVMLLELITGRRPVDSTQTYMDDSLVDWARPLLMRALEDGNYDELVDARLGKDFNPNEIARMIACAAACVRHSARRRPRMSQVVRALEGDVSLEDLNEGVRPGHSRFFGSYSSSDYDSGQYNEDMKKFKKMAFTTNDYTSSQYSAPTSEYGQIPSASSSEGQQTQEIETGTMKKGGHSGYSSGYSGPS

SEQ ID NO: 11982 - protein, 73 aa, SINNINGIA CANESCENS
ISGTNGEVMPGQWEFQVGPSVGIEAGDHIWCARYLLERITEQAGVVLSLDPKPMEGDWNGAGCHTNYSTKSMR

SEQ ID NO: 11983 - protein, 123 aa, Triticum aestivum
  unsure (1)..(123): unsure at all Xaa locations
RAGNPGSDQRPGPTKVIDWGYANDTACSQAEDVPEIDWCEPGEAAVMXALLGTKDGFLTERIKSYVFDRNYSTKPTVLFGLFSYLHSGHIPAQRCSLEAKKRLHLTAKSVDALLEELIIRTEL

SEQ ID NO: 11984 - protein, 440 aa, Staphylococcus aureus subsp. aureus Mu50
MSNGKELQKNIGFFSAFAIVMGTVIGSGVFFKISNVTEVTGTAGMALFVWFLGGIITICAGLTAAELAAAIPETGGLTKYIEYTYGDFWGFLSGWAQSFIYFPANVAALSIVFATQLINLFHLSIGSLIPIAIASALSIVLINFLGSKAGGILQSVTLVIKLIPIIVIVIFGIFQSGDITFSLIPTTGNSGNGFFTAIGSGLLATMFAYDGWIHVGNVAGELKNPKRDLPLAISVGIGCIMAVYLLINATFLLTLPIELLAGNLNAASDTSKILFGENGGKIITIGILISVYGTINGYTMTGMRVPYAMAERKLLPFSHLFAKLTKSGAPWFGAIIQLIIAIIMMSMGAFDTITNMLIFVIWLFYCMSFVAVIILRKREPNMERPYKVPLYPIIPLIAILAGSFVLINTLFTQFILAIIGILITALGIPVYYYKKKQKAA

SEQ ID NO: 11985 - protein, 117 aa, Leavenworthia stylosa
GMIHDGESRFSINGKPIHHFLGTSTFSEYTVVHSGQVAKINPEAPLDKVCIVSCGLSTGLGATLNVAKPKKGQSVAVFGLGAVGLAAAEGARIAGASRIIGVDLNSKRFEEAKKFGV

SEQ ID NO: 11986 - protein, 738 aa, Schizosaccharomyces pombe
  unsure (1)..(738): unsure at all Xaa locations
MVHELNYPLIEQFPVYGSYALQAAQFPHCSLFLHLDDPSMPCNTIRMWTIGLIYSTVGAAVNMFFSLRNPTVTLSVLISELLAYPALQIWDLIFPDREFRIGRLKFNFKPGPFNVKEHALIVVMSSVSFGNAXXXXXILAQRVHYKQRFGFGYEICLTLATQLIGYGLAGLSRRLLVRPASMLWPVNLVQCTLNKTLHRKDLRNAVANGWRIPPFRFFLYGFIASFXWNWFPSYIFQALSLXAWVTWIRPNSPTVNQIFXESTGISILPMTFXWNQISAYILSPLMAPADALMNILVGVILFLWIVTPALNFTNTWYGDYLPISSSGIIDHFGNSYNVTRILTKDATXDLDAYQNYSPIXMSTTYALAFGLSFAXXXSVIFHVILYHGKEIYDRLRDPPAPDIHEKLMKAYDEVPFYWYLSVFLAFFGMMMGTIYGWKTETPWWVIIVGVIFSAVWFIPIGIAQAITNIQLGLNVFTEFIVGYMYPGRPLAMMIYKTVGYITMTQGLAFAADLKFGHYMKLPPRIMFYTQMIATIWSCFVQIGVLDWALGNIDNVCQADQPDNYTCPNATVFFNSSVIWGVIGPKRMFSGKNTYTGLQYFWLAGVLGTIXFWALWKKWPQKWWGQLNGPLICGGTGYIPPATPVNYLAWSGIGLFXXYYLKKIXADWWQKYNFTLSAALDTGTQLSXIILXXXLQLPMVNXPDWWGNDGAXNTLDATGAAVRKLVXESAGEFFGPAEW

SEQ ID NO: 11987 - protein, 149 aa, Zea mays
  unsure (1)..(149): unsure at all Xaa locations
RGSRRKRPQADGGYKQKKAEEAASLEKEEQGHKKIMKHEALQLLKKKEKADNIIKKTKEKRQKKKQENADPNRPKRPASSFLLFSKEARXQLIEERPGINNSTLNALISVKWKELSGEERQAWNAKAAPAMAAYKKEMEEYTKAQSSSA

SEQ ID NO: 11988 - protein, 317 aa, Oryza sativa (japonica cultivar-group)
MESQALQDPVAEPHGAEPAAAGAPPAVVPGKEFTRTCKGLVVVLVGGYVLLQLLPSSLDYLAIIPAKTIPFVWTVFTAGYIEQVLPGAIGSSLGLLFCGKDIEPVWGRKEFLKFIILVNSICGVLAFCFAVALYYVTGKESFLVTPLSGFHGALAGFLVGLKQLLPNLELPMCFFWKIKAKWMPFFVLCFSTIMAFIVPDSINFLPTLLSGMYVSWIYLRYFQRNPLTGLKGDSSDDFSFPSLFPDAMRPVTDPVANLFDRMLCARSRPSELALPVSDPAKASRRRERGERVLEERLAADHAADTEAPALGHSTAED

SEQ ID NO: 11989 - protein, 129 aa, Zea mays; identical to SEQ ID NO: 11178

SEQ ID NO: 11990 - protein, 247 aa, Campylobacter jejuni subsp. jejuni NCTC 11168
MKFSGKNVLITGASKGIGASIAKTLAGFGLKVWINYRSKPELADALKDEIIASGGVAAVIKFDASKEDEFENGVKTIVESDGELSYLVNNAGVTNDKLALRMKLEDFSGVVDTNLSSAFLGCREALKTMSKKRFGAVVNIASIVGEMGNAGQVNYSASKGGMIAMTKSFAKEGASRNLRFNCVTPGFIKSDMTEVLSNEIKQTYQDNIPLKRFAEPEEVANCVAFLLSDYASYVTGDVLKINGGLYM

SEQ ID NO: 11991 - protein, 196 aa, Triticum aestivum
MAAPSAALSISGGAHTSAFGCKPKKLISNRNFLQLAVPSNSQNANLYGKLTVCRAESEDSKGGGGFLTGFLIGGAVFGTLGYVFAPQISKTLDTLLNDDGQDGKPDEQGVQSVPRPRNAQYYDEGLEKTRQTLGDKISQLNLAIDKAAARLKRVTGSVEKEAVKDETEIEISTLDDNGVLEGNSSEQGFVQGESAT

SEQ ID NO: 11992 - protein, 170 aa, Zea mays
  unsure (1)..(170): unsure at all Xaa locations
MVSLKLQKRLAASVMKCGKGKVWLDPNESSDISMANSRQNIRKLVKDGFIIRKPTKIHSRSRARKMKIAKMKGRHSGYGKRKGTREARLPTKVLWMRXMRVLRRLLKKYRETKKIDKHMYHDMYMRVKGNVFKNKRVLMESIHXSKAEKAXEKTLSDQFEAXRXXNKASR

SEQ ID NO: 11993 - protein, 461 aa, Cytophaga hutchinsonii
MKKFVTLFLALFFYVTCLHAQNCWKSVSVGDGYTLALKEDGTLWGWGLNNQGQLGNGTLVNKTVPTQIGTATNWSQISAAHNFSTALKNDGTIWAWGDNTFGQLADGTTTNKTAPIQIGTATNWQSVSAGYNHIAALASDATIWLWGNNYSGQLGDGTNTDKKSPLQIGTNEWKAIHAGSGYTIALKTDGTLWTWGNNTSGNLGNGTLADRNTPGKIGTAADWQKIYSAPMAMKADSLLWGWGYNGYGQLGNGLNGSLNNLKNPAQIGASHWKEVSPSGTHTLGIKGNGTLWAWGYNENGKLGDGTQTDRSLPTQIGTDSDWKMVNANYYHTMAIKTDGSLWAWGTNSNGQLGDGTKISKSSPTPVACSGIALSINTSLNETAIEVYPNPSQGFFLITVDPAATEHGVVRVLNMTGNIVLEKQFSEKQFEVDLTNQPEGIYYIQVQTDNTLLHTGKIIKRH

SEQ ID NO: 11994 - protein, 146 aa, Lycopersicon esculentum
MPMRPTGGLKQDWDPIVLQKPKMKAQDLKDPKIVNQALRAGAQVQTVKKIDAGLNKKAATLAVNVRKLDEAAEPAALEKLPVDVRQAIQKARIEKKMSQADLAKKINERTQVVAEYENGKAVPNQLVLGKMENVLGVKLRGKIHKS

SEQ ID NO: 11995 - protein, 165 aa, Oryza sativa
MAAEKKEVADAAAGSGSDTILLISSDGEHFNVPSAAASLSQLVSNMIEDDCTTNGVPLPNVASKVLAKVIEYCIKHAAAGEEEEKDLKSFDAEFMIDVDKNMLYGLLLASNFLNIKSLLDLCCQHTANLIKGKSPEQIRKEFGIKNDFTPEEEEEIRKENTWAFE

SEQ ID NO: 11996 - protein, 132 aa, Beta vulgaris
EGVTDLQPGDHVLPVFTGECKECAHCKSVESNMCDLLRINTDRGVMLNDGKSRFSIKGKPIFHFVGTSTFSEYTVVHVGCLAKINPEAPLDKVCILSCGISTGFGATVNVARPKKGQTVAIFGLGAVGLAVS

SEQ ID NO: 11997 - protein, 906 aa, Pseudomonas syringae pv. syringae B728a
MNDVRNNSVSMIKQGLGLSLLALGIAQAGSVFAVTPMTGNEVEARVGAMLDNMTQSEKINFSRVDDGRMIPKLDKFNLQGTVAYDSAMGVLVGGKTFGAQYPSPSALAATWSINRAKEFGLAIGYETRIAGGQQMLSPAINLYRTPFNGRAAEYMSGEDPFLGAVLAPAVTNGIQVQGVQAAAKHYLMNEQEANRHYLDVKIDERAMQELYLPGFESLVKNSNIASIMCGYNKINGEYACENHHLITDILKGQWGFQGNVMSDFNSVQDAFKGAWAGTDIDMPSGLQFTEAKLLPYVWNGQLHQNVIDDKVRRNLRALVSYGFDKGINKAQPLEHREYGQLAALNVARESIVLLRNEPVDGQKPVLPLSRNARIAVIGDMAMQPPTAPFGTAYSAPASYVTEVSGLKQLASDPSNVDYLPQMSLNPKSSVWYQPGSDQQAISNTGVKAEYYANTSLSGDPVATRVEPGVNLDWITNTNVTDYGSSAVNGYSPSAGSFSARFTGKIKPTITGPQVFKVRADGAYKLWINDELVLEDEGAQVSFDLIPVVPRTVKTPNLKAGSEYNVRLEYRRLKGNFTPVLGGMNGVQMSWAALRPPKNLGDYDAVVVAAGNNFEYEGESLDRPFELPQFQSELIGFIQKANPKTIVVLHGGGGMDMQPWADKVAASLHAWYPGQQGGQALAEILFGKVNPSGKLPITLDKKAQDNPSYASYSNPVPYYFSSPNPPVEMSYSEGLYLGYRGYDKKHTKPLYPFGFGLSYTTYAYSDLKLSSNVLAPGATIQASFKVTNTGDKAGFEVAQLYVQPSKPLVDRPEKELKGFSKVYLKPGESKTVTIALDSRSFAYYSANSVSWNVDPGKFKVLVGKDSENLTLDRTVVALYPEQLTTRDSNPLPIPLRKAVQVKAEQAY

SEQ ID NO: 11998 - protein, 190 aa, Bacillus halodurans
MTGHVKRFPILETKRLILRKITTDDARSILSYLSDKEVMKYFGLEPFQTLEDALGEIAWYESILHEQTGIRWGITLKGQDEVIGSCGFHQWVPKHHRAEIGFELSKLYWGQGIASEAIRAVIQYGFEHLELQRIQALIEPPNIPSQRLVEKQGFISEGLLRSYEYTCGKFDDLYMYSLLKRDFDKIHRSL

SEQ ID NO: 11999 - protein, 399 aa, Oryza sativa
  unsure (1)..(399): unsure at all Xaa locations
NPPKIQTRPSRRRGERNPTMAGGGGGEGKVACAAWIRRREEKEKAXRASSRRXGRAGSPPAVEVLGFDSKECSLSEPLARAELGEEPGDAPRGITVHPSGDELVCATAKGCRLFKLIFEEFTVRLISRDAPPLESVGPQKCLAFSTDGSKFAIGGEDGHLRIFHWPSMNVLLDEPKAHKSFRDMDISLDSEFLSSHXTDGSARIXWKIDXGXYPLGNLTRVPXDEKIXMCRFLXDGMKPFLFCTVAKGNKVVTVVWNISDWSRIGYKRLLGKPISTLSVSMDGKYLALGSHDGDFCAVDVKKMDVSHWSKKVHLGSPVSSIEFCPTERLRLSTSHQWGAELTKLNVPADWKXXSAILFYMFYERSDSFWNFPMGQHQPAKPWSVMKESPPVPEDQNPWX

SEQ ID NO: 12000 - protein, 395 aa, Zea mays
MERSQRQSPPPPSPSSSSSSVSADTVLVPPGKRRRAATAKAGAEPNKRIRKDPAAAAAGKRSSVYRGVTRHRWTGRFEAHLWDKHCLAALHNKKKGRQVYLGAYDSEEAAARAYDLAALKYWGPETLLNFPVEDYSSEMPEMEAVSREEYLASLRRRSSGFSRGVSKYRGVARHHHNGRWEARIGRVFGNKYLYLGTFDTQEEAAKAYDLAAIEYRGVNAVTNFDISCYLDHPLFLAQLQQEPQVVPALNQEPQPDQSETGTTEQEPESSEAKTPDGSAEPDENAVPDDTAEPLTTVDDSIEEGLWSPCMDYELDTMSRPNFGSSINLSEWFADADFDCNIGCLFDGCSAADEGSKDGVGLADFSLFEAGDVQLKDVLSDMEEGIQPPAMISVCN

SEQ ID NO: 12001 - protein, 381 aa, Oryza sativa; identical to SEQ ID NO: 1083

SEQ ID NO: 12002 - protein, 496 aa, Escherichia coli CFT073
MITTFVFIPIFAIAAGVAQSLQYLNRYHVIREPPEHILNRLPSSASALACSAHALNLIEKRTLDHEEMKALNREVIEYFKEHVNPGFLEYRKSVTAGGDYGAVEWQAGGLNTLVDTQGQEFIDCLGGFGIFNVGHRNPVVVSAVQNQLAKQPLHSQELLDPLRAMLAKTLAALTPGKLKYSFFCNSGTESVEAALKLAKAYQSPRGKFTFIATSGAFHGKSLGALSATAKSTFRKPFMPLLPGFRHVPFGNIEAMLTALNECKKTGDDVAAVILEPIQGEGGVILPPPGYLTAVRKLCDEFGALMILDEVQTGMGRTGKMFACEHENVQPDILCLAKALGGGVMPIGATIATEEVFSVLFDNPFLHTTTFGGNPLACAAALATINVLLEQNLPAQAEQKGDMLLDGFRQLAREYPDLVQEARGKGMLMAIEFVDNEIGYNFASEMFRQRVLVAGTLNNAKTIRIEPPLTLTIEQCELVIKAARKALAAMRVSVEEA

SEQ ID NO: 12003 - protein, 392 aa, Akebia quinata
DLEPVNPAEDPVTAAGALKSYKLAAKAISRLQSLPSGDISLLCDVLVHEVSDMTGYDRVMVYKFHEDEHGEAVAECLRSDLEPYLGLHYPATDIPQASRFLFLKNKVRMICDCSARSVEIVQDKRLTQPLSLGGSTLRAPHGCHAQYMENMGSVASLVMSVTINEDDDEMETNQQKGRKLWGLVVCHHSSPRFVPFPLRYACEFLIQVFGIQLNKEVELAAQLREKHILRIQTVLCDMLLRDAPVGIFTQSPNVMDLVKCDGAALYYKNKLWLLGVTPTEAQIREIAAWILEYHDRSTGLSTDSLMEAGYPGASVLGDAVCGMAAINITSKDFIFWFRSHTAKEIKWGGAKHDTVDKDDGRKMHPRSSFKAFLEVVQWRSLPWEDMEMVAIQ

SEQ ID NO: 12004 - protein, 265 aa, Lycopersicon esculentum
MGRAPCCEKMGLKKGPWTPQEDNILISYIQNNGHSNWRALPKLAGLLRCGKSCRLRWTNYLRPDIKRGNFTKEEEDTIIKLHENLGNRWSAIAARLPGRTDNEIKNIWHTNLKKKLKNYQPCQNSKRHSKTSHVSNKGPTTSESSNNSDLSTSTKQHIKIAPNSPQLSSSEMSSVTLVVDDNQMVIIKEEKIESSSSEYFPKIDESFWADELSTENNMIIGHDQEIQVREENVDIFTTSSKMEEDMDFWYNVFIKTGDLPELPEF

SEQ ID NO: 12005 - protein, 338 aa, Escherichia coli
MRVLVTGGSGYIGSHTCVQLLQNGHDVIILDNLCNSKRSVLPVIERLGGKHPTFVEGDIRNEALMTEILHDHAIDTVIHFAGLKAVGESVQKPLEYYDNNVNGTLRLISAMRAANVKNFIFSSSATVYGDNPKIPYVESFPTGTPQSPYGKSKLMVEQILTDLQKAQPDWSIALLRYFNPVGAHPSGDMGEDPQGIPNNLMPYIAQVAVGRRDSLAIFGNDYPTEDGTGVRDYIHVMDLADGHVVAMEKLANKPGVHIYNLGAGVGNSVLDVVNAFSKACGKPVNYHFAPRREGDLPACWADASKADRELNWRVTRTLDEMAQDTWHWQSRHPQGYPD

SEQ ID NO: 12006 - protein, 460 aa, Clostridium acetobutylicum
MEKKELSRGLKARHIELIALGGTIGVGLFMGSASTIKWAGPSVLLAYGVAGIAMYIIMRIMGEMLYLEPLAGSFANYANKYISPLAGYITAWCYWFMWIAVGMSEITAIGIYVKFWFPALPAWIPALIGVAILAAANMASVKFYGEFEFWFSLIKVVTIVVMLIVGVGLIFFGIGNHGVPIGFKNLTAHGGFFAGGLKGWLFALCMVTASYQGVELIGITAGEAQDPKNTLRKATKNIIWRILIFYVGAIFVIVTIYPWDKISTLGSPSVLTFAKIGIAAAAGIINFVVLTAAMSGCNSGIYSCGRMLYTLATNGQAPKFLGKLNKDGVPANGIRTTLVCLLIGVILNYIYPNSKLFVYIYSASVLPGMAPWFVLCISQIKFRKEHAEEMKMHPFKSRLFPYANYIVVAYLCLVLIGMCFNSSTQIPLFIGAVFCAIVTIAYFAFGIHKGKVSKVEELQE

SEQ ID NO: 12007 - protein, 250 aa, Zea mays; identical to SEQ ID NO: 5766

SEQ ID NO: 12008 - protein, 261 aa, Archaeoglobus fulgidus DSM 4304
MSKLRYNLWFGVYDGKEIKLSENFEESFLKAENPSPLPFNVSEVGAKALGKDYYRILRKTALAVSEKMVEKELRREDRYVVALVKALEEIDESINMLNEKLEDIRAVKESEITEKFEKKIRELRELRRDVEREIEEVMEKIAPNMTELVGAKVAAKLLERAGSMERLVRLPASKIQVIGAEKSLYKAFARMKKGKKAKIPKHGIIFLHPFIRTLPKAKRGKMARFLAAKLAIAAKIDYFRGEIDESLYESIRRRYEELRRK

SEQ ID NO: 12009 - protein, 166 aa, Pyrococcus horikoshii
MKVLFLTANEFEDVELIYPYHRLKEEGHEVYIASFERGTITGKHGYSVKVDLTFDKVNPEEFDALVLPGGRAPERVRLNEKAVSIARKMFSEGKPVASICHGPQILISAGVLRGRKGTSYPGIKDDMINAGVEWVDAEVVVDGNWVSSRVPADLYAWMREFVKLLK

SEQ ID NO: 12010 - protein, 334 aa, Burkholderia fungorum
MARKITFSQAINEALSQEMARDETVIVMGEDNAGGAGSPGEQDAWGGVLGVTKGLFHKYPGRVLDTPLSEGGYIGAAVGAAACGMRPVAELMFIDFMGVCFDQIFNQAAKFRYMFGGKAVTPVVIRAMQGAGLRAAAQHSQMLTSLFTHIPGLKVVCPSTPYDAKGLLIQAIRDNDPVIFCEHKLLYSREGDVPEESYAIPFGEANVVRDGDDATIVTYGRMVHYATEAAEKLAKDGIEVEVIDLRTTSPLDEDTILESANRTGRVVVVDEANPRCSMATDISALIAQRAFRSLKAPIEMVTAPHTPTPFAGVLEDMYIPSARQIADAVLKVRG

SEQ ID NO: 12011 - protein, 345 aa, Zea mays
MAGRSDKKPASSAPPRKGGYPHGSVYGSSSEPRKQDACTFSPSVSSKDSLHKVVTLTPVQPQKPVDSRGSHCNAGSDSGEAPFDICMSGNKCAVKLKPSIFETNRERKQRDRECSKDVGPLQLRPGMVLLKRFIKPNDQVKIVKLCSQLGVGPGGFYRPGYRNGALLKLWMMCLGKNWDPDSSSYGDRRLFDGAQPPTIPEEFQKFVQDGIQASHEFLKQQKGATNVVQEIPAMSPDICIVNFYNSSGRLGLHQDKDESQSSLDKGLPVVSFSIGETAEFMFGDDRDEEKISKVDLESGDVLIFGGESRLIFHGVNNTKPKTAPKWLTDETSLRPGRLNLTFRQY

SEQ ID NO: 12012 - protein, 358 aa, Glycine max
METRAAAKRKANAATIVFVEKQYPNKRQRVVLGELPNLQNLIVSETQNSRKEKLLCRKNPNEKKPSPTNNNTFPSPQINESYDSDIHGYLREMEMQNKRRPMVDYIEKVQKIVTPTMRAILVDWLVEVAVEYKLLSDTLHLSVSYIDRFLSVNPVSKSRLQLLGVSSMLIAAKYEEMDPPGVDEFCSITDHTYDKTEVVKMEADILKSLMFEMGNPTVSTFLRRYADVASNDQKTPNLQIEFLGSYIGELSLLDYDCLRFLPSIVAASVIFLAKFIICPEVHPWTSSLCECSGYKPAELKECVLILHDLYLSRKAASFKAVRAKYKQQKFECVANLPTPPYVPSCYFEDQWCSEFLDK

SEQ ID NO: 12013 - protein, 357 aa, Leuconostoc mesenteroides subsp. mesenteroides ATCC 8293
MTSVKKIVVLKGDYIGPEIMTAGLAVLDAATKDTTFAYELIDAPFGGDGIDRAGDPLPQSTIDVSKQADAVLLSAIGGPKWDNAPRRPEQGLLEIRSKLNLFANIRPTKVTAAQIDRSPLKPEYVENTDFVIVRELTSGAYFGKPRKLEAHQAIDTMYYSEEEVTRIMHQGFKMAQKRNKHVTIVDKSNVLATSKFWRKIANEVGKSYQDVTIDYYYVDAMTMAIMAKPTTFDVVIIPNLFGDILSDEAAQITGSIGQIPSMSVGESGPNLYEPIHGSAPDIAGQGIANPISMVNTVAMMLTESFDEKRIADKITAAVDYIIENHCVTPDMGGTMTTDEVTQKMVDYIKNYESADIK

SEQ ID NO: 12014 - protein, 211 aa, Zea mays
MARPRSVAAAAPLLLLLLAAAAAGLVSAASPAASDFVRKSCRTTQYPSVCEQSLASYGGSPPPRSPRELARAALSVSADRARAASAYVGRLCGASNGKGAKKGSGSASASAGPVRDCLDNLADSVGHLRDAAQEMGGAGMGRAGTPAFRWHLSNVQTWCSAALTDEDTCLDGLSSRAVDAGTRAAIRGKVVEVAQVTSNALALVNKVGPGY

SEQ ID NO: 12015 - protein, 173 aa, Triticum aestivum
MSCAVERGIQHPSAMRATSQLPARLLLQRLLICFFLLSIAAGVTDKLERGQKLTDGDTLVSAGDSFTLGFFSPGASTKRYLGIWFSVSNDTVCWVANRDKPLLDKSGTLVLNDVGSLVLGDTSRRARTVWSSNFLPASAAAVQLLDSGNLVVRNGSSNASLWQSFDQPSDTLL

SEQ ID NO: 12016 - protein, 1129 aa, Petroselinum crispum
MSSSRPANSSSNPGRANQNARVVLTTLDAKIHADFEESGNSFDYSSSVRVTSAVGENSSIQSNKLTTAYLHHIQKGKLIQPVGCLLAVDEKSFKIMAYSENAPEMLTMVSHAVPSVGEHPVLGIGTDVRTIFTAPSAAALQKAVGFTDINLLNPILVHCKTSGKPFYAIAHRVTGSLIIDFEPVKPYEVPMTAAGALQSYKLASKAVNRLQALPGGSMERLCDTMVQEVFELTGYDRVMAYKFHDDDHGEVTAEVTKPGLEPYFGLHYPATDVPQAARFLFLKNKVRMICDCRANSAPVLQDEKLPFELTLCGSTLRAPHSCHLQYMENMNSIASLVMAVVINDSDEVVESSDRNSVKSKKLWGLVVCHNTSPRFVPFPLRYACEFLAQVFAIHVSKELELENQIVEKNILRTQTLLCDLLMRDAPLGIVSQSPNMMDLVKCDGAALLYKNKVYRLGATPSDYQLRDIVSWLTEYHTDSTGLSTDSLYDAGYPGALALGDVVCGMAVVKITSHDMLFWFRSHAAGHIRWGGAKAEPDENHDGRKMHPRSSFKAFLEVVKTRSTTWKEFEMDAIHSLQLILRKALSVEKAVAAQGDEIRSNTDVIHTKLNDLKIEGIQELEAVTSEMVRLIETATVPIFAVDADEIVNGWNTKIAELTGLPVDQAMGKHLLTLVEDSSVGTVVFLLALALQGKEEQGIPFEFKTYGSREDSVPITVVVNACATRGLHDNVVGVCFVAQDVTSQKTIMDKFTRIQGDYKAIVQNPNPLIPPIFGTDEFGWCSEWNQAMTELSGWRREDVMNKMLLGEIFGIQTSCCHLKSKEAFVNLGVVLNNALTGQISEKICFSFFATDGKYVECLLCASKKLHGEGTVTGIFCFLQLASQELQQALHIQRLTEQTAMKRLKTLSYLRRQAKNPLCGINFVREKLEEIGMGEEQTKLFRTSVHCQRHVNKILDDTDLDSIIDGYLDLEMSEFRLHDVYVASRSQVSMRSNGKAIQVVDNFSEEMMSETLYGDSLRLQKVLADFMSVCVNLTPVGGHLGISVTLTEDNLGQSVQLVHLEFRITHTGAGVPEEAVSQMFGSDSETSEEGISLLISRKLVKLMNGDVHYLREAGKSTFIITVELAAASKRES

SEQ ID NO: 12017 - protein, 247 aa, Magnetospirillum magnetotacticum
MFADRAFRSPLVSFLVGFSMLAAGVTSAAGLSLAFAGDYFATFVDAPDRLVAVLFLAVVAALNARGIKESLRANVAMTAIELSGLVLVVVLAAVVLGRGEGSPGRVTQFAEGTTPALAVLAAAILAYYSFVGFETSANLAEEVRDVRRTYPRALFGALVSAGVVYVAVGVAAVAVVDPETLAGSTGPLLEVVDAEGSVPAWVFSLVALIAVANGALLTMIMASRLAYGMAEQGLLPATLGRVLPRRR

SEQ ID NO: 12018 - protein, 109 aa, Oryza sativa
  unsure (1)..(109): unsure at all Xaa locations
MGWKGILGFDHGVVQAPLGPDISGPELAAAVANAGGIGLLRLPDWPAPDRVRDLIRRTRSLTERPFGAAIVLAFPHEENLXVVLEEKLAVLQVYWGEFPRERVDEAHLX

SEQ ID NO: 12019 - protein, 388 aa, Azotobacter vinelandii
MLGATGSIGLSTLDVIARHPERYRAFALTGFTRLDELRALCLRFAPCYAVVPEAAAACRLEDELRAAGLDTRVLFGSEGLCEVAAHPEADAVMAAIVGAAGLRPTLAAVEAGKKVLLANKEALVMSGALFMQAVRRSGAQLLPIDSEHNAIFQCLPAAYGNGLATVGVRRILLTASGGPFRETPAAELIEVTPAQACAHPNWSMGRKISVDSASMMNKGLELIEACWLFDARPAQVEVVVHPQSVIHSLVDYIDGSVLAQLGNPDMRTPIAHALAWPERIDSGVVPLDLFSIARLDFQAPDPARFPCLRLAREAAEVGGSAPAMLNAANEVAVAAFLDGRVRFPEIASIIEDVLQGEPVVAIDDLETVLHVDIQARARAQAWLLRRER

SEQ ID NO: 12020 - protein, 619 aa, Saccharomyces cerevisiae; identical to SEQ ID NO: 396

SEQ ID NO: 12021 - protein, 417 aa, Saccharomyces cerevisiae
MSDPIRTKPKSSMQIDNAPTPHNTPASVLNPSYLKNGNPVRAQAQEQDDKIGTINEEDILANQPLLLQSIQDRLGSLVGQDSGYVGGLPKNVKEKLLSLKTLQSELFEVEKEFQVEMFELENKFLQKYKPIWEQRSRIISGQEQPKPEQIAKGQEIVESLNETELLVDEEEKAQNDSEEEQVKGIPSFWLTALENLPIVCDTITDRDAEVLEYLQDIGLEYLTDGRPGFKLLFRFDSSANPFFTNDILCKTYFYQKELGYSGDFIYDHAEGCEISWKDNAHNVTVDLEMRKQRNKTTKQVRTIEKITPIESFFNFFDPPKIQNEDQDEELEEDLEERLALDYSIGEQLKDKLIPRAVDWFTGAALEFEFEEDEEEADEDEDEEEDDDHGLEDDDGESAEEQDDFAGRPEQAPECKQS

SEQ ID NO: 12022 - protein, 143 aa, Zea mays
  unsure (1)..(143): unsure at all Xaa locations
YWVLKATKICNNMAMAEEFDTHDPKENILLPPYLRKRXKIIEIVAARGIVFALSQSGVWATFSRDEVIHNLFYNKNNDSLINVLVYGSENFSALRYRTTRTKYALARQSDVWSSLFESESMKMPGFVEFDGVNGKXLTYSAHD

SEQ ID NO: 12023 - protein, 174 aa, Oryza sativa
  unsure (1)..(174): unsure at all Xaa locations
MLGTTAAQPTSXGGAGSPHLARGMDLGAASTRXIVCGWRFPPLXKNVSRCGKLAICRAQSEDSKGGGGFLTGFLIGGAIFGTLGYVFAPQISKTLDSESDEHGLVKPRYGRYYDEGLEKTRQTLGDKISQLNLAIDKAASRLKRVAGNVEKEAINDESEVETSXNLYLFRSSVC

SEQ ID NO: 12024 - protein, 227 aa, Zea mays
  unsure (1)..(227): unsure at all Xaa locations
MDGPKRSQLRVRLRVTARRRGADGDGAGGAAGHGGRKRRMEAPVRNSVAKLQRREIGGRQLAARGGGPAAAVPERFRNMQLQEEFDTYDENAHLFVKLQFLKRRSKIIEIVAAKDIVFALANSGLCAAFDRVTNKRIAFLNLSPDEVIRSLFYNKNNDSLITVSVYAADKFSTLKCRTTPIEYIRRNQLDAGFPLFESESLKWPXFVEFDDVNGKVLTYSAQDGYAS

SEQ ID NO: 12025 - protein, 265 aa, Glycine max
  unsure (1)..(265): unsure at all Xaa locations
MEGVSPEPLRSELDSKSKHDTAKEDDDALKDSTEAEVTKIRLMRAFVESRDPSSKEENDLMMRRFLRARSLDVEKASAMFLKYLKWKRSFVPNGCISPSEIAEDIAQDKVFTQGLDKKGRPIVVTFAAKHFQSKNGADGFKRYVVFVLEKLCSRMPPGQEKFLAIADIKGWAYVNSDLRGYLNSLSIXLQDCYPERLGKMLIVHAPYMFMKIWKMIYPFIDENTKKKIVFVENKKLKSTLLEEIEESQIPDIYGGQMPLVPIQNS

SEQ ID NO: 12026 - protein, 386 aa, Triticum aestivum
MEALKKQASKLREHVAKQQQAVRKTFSARHNQDTSLVDEAELECHQNLQKLYNTTRAAKHFQRTIVRGLEGFVAVSTKQMEIVKKLAEDCCKYGNNNQNVGFVLGKASVEFGKSHNQMEIEREKLLRVLGEQVFEPLREMIMSAPLEDARLLTYRYQRIRQDMESQIADVVRRQLKSKESSGNTDSVKLQHAESKLSELRTTLAALGKEATAAMEAVEAQQQQITFDRLLAMVDAERTYHQNVADILNKLHDEMLNARPHEESDNNDDVPSSDPSSEPKESSPKVSPTHVHSNSISEDPALTETSEPTRNGQEVHYVGEVIHPFDGQADGELSISVGDFVVVRQVSPNGWSEGECKGKAGWFPSAYVEERDKAPASKVIEPGRLTA

SEQ ID NO: 12027 - protein, 194 aa, Triticum aestivum
  unsure (1)..(194): unsure at all Xaa locations
RFVCEAAEAALMSMYKXISPSVLLPKMQPYLKNRNPRIRAKASVCFSKSVPRLGLEGIKEYGMDKLIQVAATQLSDQLPESREAARNLSLELQAFYEKSQASGSAEDDSAPAISPEAETWEAFCLSKLSALSAQAILRVTVGVPVAPKEGGISAALKEGAVPAAMKEGGISVVVAPKEGGVPVATKEGAAAVGC

SEQ ID NO: 12028 - protein, 462 aa, Streptomyces avermitilis MA-4680
MSSRTTLDTAPETSAADAPLSHGLKQRHLSMIALGGVIGAGLFVGSGAGIAAAGPSIVIAYSVSGLLVMLVMRMLGEMSAAYPSSGSFSAHAERAIGPWAGFTAGWSFWVLLCTAVGLEGIGAAKIVTGWLPGTPEWGWVALFMVVFCVANLAAVKNFGEFEFWFAALKVGAISLFLVLGVLAMTGVLPGTDSPGASNLHDFLPNGSEGLVIGLLASVFAYGGLETVTIAAAESENPVQGVARAVRTAMWRIALFYIGSMAVIVTLVPWDSKEVVEKGPYVAALDHLGIPGAGQLMNVVVLVALLSAMNANIYGSSRIAYSLVERGQGPKALGRVSGGVPRIAVLVSCVFGFVCVVLSYWRPNDVFPWLLNMIGAVILVVWIFIAVSQLLLRRKVEREAPEKLVVRMWAYPVLTWVALAGMAAIFILMARQPDTRVQLYSTGAMTLVLAAVGYAWQRARARA

SEQ ID NO: 12029 - protein, 427 aa, Brassica napus
DISYTLSFLLVFFVVILFRPAFSINTLSSTESLTISSSRTLVSPGNVFELGFFKTTSSSRWYLGMWYKKFPYRTYVWVANRDNPLSNDIGTLKTSGNNLVLLDHSNKSVWSTNVTRGNERSPVVAELLANGNFVMRDSNNNNASQFLWQSFDYPTDTLLPEMKLGYDLKTGLNRFLTSWRSSDDPSSGDYSYKLELRRLPEFYLWKGSIRLHRSGPWNGIQFSGIPEDQKLSYMVYNFTENSEEAAYTFRMTNNSFYSILTISSTGYFERLTWAPSSMVWNVFWSSPNHQCDMYRMCGPYSYCDVNTSPVCNCIQGFRPKNRQQWDLRIPTSGCIRRTRLSCSGDGFTRMKNMKLPETTMAIVHRSIGLKECEKRCLSDCNCTAFANADIRNRGTGCVIWTRELEDIRTYSAAGQDLYVRLAAADLV

SEQ ID NO: 12030 - protein, 620 aa, Perilla frutescens
MATANQKGVTDNLRNQLALAVRSIQWSYAVFWSFSAKQSGSLEWGEGYYNGDIKTRKTVQAVELNSDPLGLQRSDQLRELFESLSLGETSPQPKRPTAALSPEDLTDTEWYFLVCMSFVFNVGQGLPGRSFAKNDTIWLRNAHLADTKLFSRSLLAKSASLQTVVCFPHLGGVVELGTTELVAEDRNLIQHIKTSFLESSSDTVINPNHDLVYQVLDHANDPENNLDDVEVCSPDTSSDDFADNVLIEGSSLADGADGEASQLQNWQFKDDAISNGLNNSTSSSDCVSQTQGNPVTVVQQLDGKKTSDNCMPVNQECNQQKSPPGFNGSDVHYQSVLSSLLKSSHQLMLGPNRNGKQESSFISWKDRKLSSRLPQILSPQRLLKKVLFEVARMHENARIESAKQKDKCDDHSGQEADEVDRNHVLSERKRREKISERFSILVSLVPSGGKVDKVSILDHTIEYLRELERKVKDLESYKEATERESTTQSKAHDSIERTSDNYGHSKFGSITKLLGNKRKSCDTEKMAGENKRGRSSSSTDSITISITDKDVLIEMRCSWRQCVLLEVMEALTQLNLDSQSVQSSNTDGILSLSINAKSKGVKGASAGAIKQALQRIIKKC

SEQ ID NO: 12031 - protein, 298 aa, Saccharomyces cerevisiae
MSTNAKESAGKNIKYPWWYGGAAGIFATMVTHPLDLAKVRLQAAPMPKPTLFRMLESILANEGVVGLYSGLSAAVLRQCTYTTVRFGAYDLLKENVIPREQLTNMAYLLPCSMFSGAIGGLAGNFADVVNIRMQNDSALEAAKRRNYKNAIDGVYKIYRYEGGLKTLFTGWKPNMVRGILMTASQVVTYDVFKNYLVTKLDFDASKNYTHLTASLLAGLVATTVCSPADVMKTRIMNGSGDHQPALKILADAVRKEGPSFMFRGWLPSFTRLGPFTMLIFFAIEQLKKHRVGMPKEDK

SEQ ID NO: 12032 - protein, 287 aa, Triticum aestivum
MATAVTASATAATRFTRLAGVALRRSSCRPHTAVRFQRPGLTTTALLRPTELKPKDQGQPETLDYRVFLVDGADRKVSPWHDVPLRAGDGAFHFIVEIPKESSAKMEVATDEAYTPIKQDTKKGNLRYYPYNINWNYGLLPQTWEDPTAANADVEGALGDNDPVDVVEIGERRANIGDVLRVKPLAALAMIDEGELDWKIVAISLDDPKASLVNDVDDVEEHFPGTLTAIRDWFRDYKIPDGKPANRFGLGNKPTSKEYALKVIEETNESWEKLVKRKIPAGELSLA

SEQ ID NO: 12033 - protein, 250 aa, Pimpinella brachycarpa
MGKCYPTVSEEYKVAVEKCRRKLRGFIAEKNCAPLMLRLAWHSAGTYDVKTKTGGPFGTMRQKLEQSHAANNGLDVAVRLLEPFKEQFPIISYGDLYQLAGVVAVEITGGPDVPFHPGRPDKDEPPQEGRLPNATLGNDHLRNVFVKTMGLSDKDIVTLSGGHTLGRAHKERSGFEGPWTSNPLIFDNSYFKELLTGEKEGLLQLPTDKSLLEDPVFRPLVDKYACDEDAFFADYAESHMKLSELGFAEA

SEQ ID NO: 12034 - protein, 467 aa, Tacca chantieri
SGKPFYAIIHRVTACLIVDFEPVKPSELPMTAAGALQSYKLAAKAIARLQSLPGGSMERLCDTVIEEVFELTGYDRVMVYKFHEDDHGEVFREITKPGLEPYQGLHYPATDIPQAARFLFMKNKVRMICDCRAKPVKIYQDDKLPLDLTFCGSTLRAPHSCHLQYMENMNSIASLVMAEVVNEGEEDDENLEPGQTQQQKKKRLWGLVVCHHESPRFVPFPLRYACEFLMQVFAIHVNKEFELENQIREKNILRTQTLLCDMLLRDTTPVGIMNQSPNIMDLVKCDGAALLYQNKVWRLGLTPTEAQIRDIAYWLAEYHMDSTGLSTDSLHDAGYPGALGLADVVCGMAAARITSKDMLFWFRSHIAAEIRWGGAKHDPADKDDGRRMHPRTSFKAFLEAVKMRSLPWKDYEMDAIHSLQLILRGTFSDSRNVNSRASLDARVNDLKLEGMVELQAVTNEMVRLMET

SEQ ID NO: 12035 - protein, 192 aa, Xylella fastidiosa Temecula1
MNMLNVLRFPVLALALAFVSSGVLADVGSLLDLDYRPLAGKETVNLQRLYGGKVLLVVNTASKCGFTPQYEGLEALHQKLSPLGFAVLGFPSNDFKGQEPGDEQQIQEFCTLTYGVKFPMFQKVHVKGNEVTPLYQRLTQTTGVAPGWNFHKYLIARDGHVVAQFDSRTRPDDPILLEAIKRELAKSVQVVH

SEQ ID NO: 12036 - protein, 257 aa, Zea mays
MAQTLSNAPSVFTTRKVGAPHTLEHRVYIEKDGVPVSPFHDIPLYANEQQTILNMVVEIPRWTNAKQEISKEETLNPIKQDTKKGKLRFVRNCFPHKGYLWNYGCFPQTWEDPNVTHPETKMNGDNDPLDVCEIGELVAKVGEVKQVKVLGVMALLDEGETDWKIIVIDVNDPLAPRLNDVEDVERHLPGLLRATNEWFRIYKIPDGKPENQFAFSGECKNKKYAMDIVRECAESWEKLITGKTPKGDINLTNTLVP

SEQ ID NO: 12037 - protein, 118 aa, Glycine max
  unsure (1)..(118): unsure at all Xaa locations
MAILLRTRTLLYSKPTTTTLIKTITTFPFLSQEPQLVDSTPPPSYSTTPLPPNLASGSPLYNENWGSPIPPTPTACSYGTFHALAPVGFYNRATXETYDRRALLDHIGDWMASQQWHD

SEQ ID NO: 12038 - protein, 361 aa, Thermosynechococcus elongatus BP-1
MATTYRIAVLAGDGIGPEITAVALDVLRAIAPRFGLDFDFVPALVGGCAIDAVGEPLPAATLATCRQSDAVLLAAIGGTQWDSLPRHLRPETGLLALRSGLGLFANLRPAKIFPQLLHASSLKPEVIAGVDLMVVRELTGGIYFGQPRGIFTTETGEQRGVNTMAYTATEIDRIGRVAFETARKRQGKLCSVDKANVLEVSQLWRDRLTALSAEYPDVELTHLYVDNAAMQLVRAPKQFDTIVTSNLFGDILSDIAAMLTGSIGMLPSASLGESGPALFEPVHGSAPDIAGQDKANPLAMVLSAAMMLRYGLNQPAAAQAIEEAITAVLDQGYRTGDLMSEGCTLVGCREMGNLLIKELSR

SEQ ID NO: 12039 - protein, 168 aa, Zea mays
MAEKKMITLRSSDYKDFEVEEAVAMQSEIIRFMIEDECADNAIPLPNVDSKTLALVIKYCNKHVHAAAADSAAAETSSSASSARGGGEVDLKKWDAEFVKVDQVTLFNLVLAANYLDIKGLLDLTCQTVADMFKDKSPEEIRRTFNIKNDFTKEEEEEIRRENSWAFD

SEQ ID NO: 12040 - protein, 462 aa, Magnetospirillum magnetotacticum
MSENWSPESWRAKPIHQAPTYPDAARLAEVEESLRNFPPLVFAGEARRLKASLADVADGKAFLLQGGDCAESFAEFHANNIRDTFRVLLQMAVVLTYGAAMPVVKVGRMAGQFAKPRSADTETIDGVTLPSYRGDNVNGSEFTAEARVPDPERMVRAYNQSAATLNLLRAFAQGGYADLHKVHQWTLGCVAGTLQAARYQDLCDRLDETLAFMEACGMTSDTTPQLRETDFFTSHEALLMPYEQALTRIDSTTGDWYDCSAHMLWIGERTRQLDAGHVEFLRGVKNPLGFKAGPTMSPDDLLRLMDRLNPENESGRITVITRMGAEKVEAVLPGLIRAVEREGRKVVWSCDPMHANTIKAAGGYKTRPFDAILAEVRAFFAVHKAEGSHAGGVHFEMTGQDVTECIGGMTGVAEEDLGDRYQTACDPRLNATQSLELAFLIAEQLKDERALLRAKSQAKPRG

SEQ ID NO: 12041 - protein, 244 aa, Escherichia coli K12
MNFEGKIALVTGASRGIGRAIAETLAARGAKVIGTATSENGAQAISDYLGANGKGLMLNVTDPASIESVLEKIRAEFGEVDILVNNAGITRDNLLMRMKDEEWNDIIETNLSSVFRLSKAVMRAMMKKRHGRIITIGSVVGTMGNGGQANYAAAKAGLIGFSKSLAREVASRGITVNVVAPGFIETDMTRALSDDQRAGILAQVPAGRLGGAQEIANAVAFLASDEAAYITGETLHVNGGMYMV

SEQ ID NO: 12042 - protein, 323 aa, Pseudomonas syringae pv. tomato str. DC3000
MSVLNTAMTALLGIDCPLALAPMGGASGGRLAAAVSRAGGLGLVGASYGDPQWMARELELMRDVKQPWGVGLVMFTVARRFELLDLALQYGPDVIALSFGDVRPFIKPIQRANARVIVQVHDVDQAHYALDAGADALIVQGAEAGGHGLHRSSLPLFPAVRDAVGDAVVLIGAGGIADGRGMAAALALGMDGVMMGTRFLASEEALPSARVKQRVVQAVASDTVRTRLFDQVRGIEWPEGYKGRAIANDFSAAWVGEEQAFAASVDRLHVEYETAMADDDVSVKAIWAGEVADLIKDIQPAQLIMESTLRGYADSIERLRAFR

SEQ ID NO: 12043 - protein, 243 aa, Oryza sativa
  unsure (1)..(243): unsure at all Xaa locations
MGIPAASIAARTAAGAELAGVIAARAVRRRSLDGSGGAAGCRRMAIHLAXHYRNGALEQALLFTSPKATKIGAHRKRRIEDHFKEGGQRSWIQALSNRLTATILGIILATLTGGHDQCLDYHESKAITEIIXGGMIDHYCCWNGYTXSCELGVLSDEQTRIITTVNPVRRYKGGXDLKGLLAATASGLIIHLTFGLVALLTDXSSLDEALPQLIIXPISGTAALLDSLIDSPXGATLHVSGYX

SEQ ID NO: 12044 - protein, 209 aa, Glycine max
  unsure (1)..(209): unsure at all Xaa locations
MSSGATHWCHACRQPVVLDGRDAVCPYCDGGFVQELDELEGIAPHHTFCSQSGEFHQMPDIFDAIPAFMGQRGSDQRSRLMDDAVDNFMRHRTAGRNSNFDVRGRSGSRPVPERSWGVFSSGPYLIFHGQVPGSTFAAGSPRGGSRHVDFGDYFMGLGLEELIEQLTMNDRRGPPPGALSSIDAMPTIKITQAHLRLDYTXPVCKEKFE

SEQ ID NO: 12045 - protein, 220 aa, Matricaria chamomilla
MENTNVVLLTTWASGFGMRVQIALAEKGIEYEYKEEDLSNKSSLLLEMNPVHKKIPVLIHNGKPICESNIIVQYIDDAWSNKSPSLLPSDPYLKAQARFWADFVDKKIYDAARKIWTTKGEEQETAKKEFIDWLKVMEGQLGDKPYLIGDSFGYADIALIPFSCWFYTLETIGNMSIEKECPKLVAWVKRCMERESVSKSLADPHKMYEFVLQLKKKLGL

SEQ ID NO: 12046 - protein, 494 aa, Oryza sativa
  unsure (1)..(494): unsure at all Xaa locations
MDASAGGGGNSLPTAGADGAKRRVCYFYDAEVGNYYYGQGHPMKPHRIRMTHALLAHYGLLDQMQVLKPHPARDRDLCRFHADDYVAFLRSVTPETQQDQIRALKRFNVGEDCPVFDGLYSFCQTYAGGSVGGAVKLNHGHDIAINWAGGLHHAKKCEASGFCYVNDIVLAILELLKYHQRVLYVDIDIHHGDGVEXEAFYTTDRVMTVSFHKFGDYFPGTGDIRDIGHSKGKYYSLNVPLDDGIDDDSYQSIFKPIISKVMEMYRPGAVVLQCGADSLSGDRLGCFNLSGKGHAECVKFMRSFNVPLLLLGGGGYTIRNVARCWCYETGVALGEELPEKLPYNEYYEYFGPEYSLYVAASNMENRNTNKQLEEIKCNILDNLSKLQHAPSVQFEERIPETKLPEPDEDQEDPDERHDPDSDMLLDDHKPMGHSAXSLIRNIEVKREITESEAKDQHGKRLTTEHKGPEPMADDPGSSKQAPVSRRLLYPSANP

SEQ ID NO: 12047 - protein, 346 aa, Streptomyces griseus
MTTVAAYAAPRAKAPLERTTIERRPVGEFDILIDIKFAGICHSDIHQARDGWGEGIFPMVPGHEIAGIVAETGPGVTRFKVGDRVGVGCMVDSCGTCDACLMGREQHCAEGNTQTYNALDRNGEPTYGGYSTHLVVTEKFALSIPEGIALDEAAPLLCAGITTYSPLRRWGAGPGKKVAVVGLGGLGHMAVKIAHALGAEVTVLSQSLRKKDDGLKLGADHYYATGDPRTFEELAGTFDVILSTVSAPLDFGAYLALLRTEGTLVNVGAPEEPVSLNLFSLILGNRSIAGSAIGGIEETQEMLDFCAVHGLGAEIEVIGAGQVNEAYERVLASDVRYRFVIDTATI

SEQ ID NO: 12048 - protein, 483 aa, Zea mays
MDGPKRHLRVRLRVTARRRGAYGDGAGGALGPRRRKCRMETPVLNSAAKLQRREIGGRQLAARGGGPAAAVPERFRNMQLQEEFDTYDDNANLFVKLQFLKRRSKINEIVAAKDIIFALANSGLCAAFNRVTNKRIGFLNLSPDEVIRSLFYNKNNDSLITVSVYASDNFSTLKCRTTPVEYIRRNQLDAGFPLFESESLKWPGFVEFDDVNGKVLTYSAQDGIYKVFDLKNYYFLYSIPDENVQEIKISPGIMLLIYDRTPSYVPLKILSIEDGKQLKFFKHLLHRNKKIDFIEQFNEKLLVKQEDENFQILDVRSSELIEVNVSKFMTPSAFIFLYENNLFLTFRNRTVAVWNFRGDLVTSFEDHLLWHHDCSTNNIYITSDQDLIISYCKSEAVAEDGTVVPVGSINMSEIMTGKCIAKITANDPALSAPPRRNGRSKRRSSVWSTVPEALEDVTALFYDEDRNEIYTGNSHGLVHVWSN

SEQ ID NO: 12049 - protein, 283 aa, Physcomitrella patens
MGRGKIEIKKIENTTSRQVTFSKRRGGLLKKAHELAVLCDAEVALVIFSSTGKLFEYASSGSMRDIIERYKKSPNGAMKSGASTDFLGREVVKLQEQVERLKSSQRRMLGEDLSALKVPDLLQLEQQLDLGASRVRARKNQLILEEIEGLQKKEQELMVANEDLRKKIADAEAVARANLSEARPESPRHLARTLSRDVSASSHPAATVYPHPNLRDVQRSQTSLQLGMFSSESYPPSSSRWPSEQQFPSASEGCAGESSMKWDHPHYHIQNRLHANILPSVRI

SEQ ID NO: 12050 - protein, 595 aa, Zea mays
  unsure (1)..(595): unsure at all Xaa locations
MAVGGPSWPNLQCLVRRKPATAGWAEDADRGGVQRLAKTLSIPHLVAIGVGSTIGAGIYVLVGTVAREHTGPGLTLSFLIAGVAAALSALCYAELSCRFPSAGSAYHYSYICIGESVAWLIGWALILEYTIGGSSVARGMSPNLALFFGGQDKLPFFLAQVHVKGLDTPVDPCAAILVLIVTALLCLGIKESSSVEGIITTANIIVMLFVICAGGWLGFRNGWVGYKVPEGYFPNGISGVLSGSATXFFAFIGFDTVASTAEEVKNPRRDLPLGMGLTLSLCCFLYMMVSAVVVGLVPYHAMDPDTPISSVFARYGMQWAEYVVSSGAVLALVASLIGGILPQPRIIMAMARDGLLPPLFSDVNRKTQVPILSTVLIGTCASVLAFFMDVSQLAGMVSVGTLLAFTAVAISVLVVRYAPPYEMPMEVALAVASFSGHLEHDEQNSEDPFSNVQEALDVSEVAREVRRQKAIGSIVLICVGAIILISAVSVSFLPFYVQRIACTVGGLAVLGSSIVLLCIGQDKKFLGQTGGFMCPLVPFLPVCCIMVNLYLLMNVGSHTWIRVSIWLVAGALIYIFYGMKHSSLASMAYHRISPL

SEQ ID NO: 12051 - protein, 354 aa, Neisseria meningitidis MC58
MKAARFYDKGDIRIEDIPEPTVAPGTVGINVAWCGICGTDLHEFMEGPIFIPPCGHPHPISGESAPVTMGHEFSGVVYAVGEGVDDIKVGQHVVVEPYIIRDDVPTGEGSNYHLSKDMNFIGLGGCGGGLSEKIAVKRRWVHPISDKIPLDQAALIEPLSVGHHAYVRSGAKEGDVALVGGAGPIGLLLAAVLKAKGIKVIITELSKARKDKARESGVADYILDPSEVDVVAEVKKLTNGEGVDVAFECTSVNKVLDTLVEACKPAANLVIVSIWSHPATINVHSVVMKELDVRGTIAYCNDHAETIKLVEEGKINLEPFITQRIKLDELVSKGFERLIHNNESAVKIIVSPNL

SEQ ID NO: 12052 - protein, 388 aa, Salmonella enterica subsp. houtenae
QNGKLNVPENPIIPFIEGDGIGVDVTPAMLKVVDAAVEKAYKGERKISWMEIYTGEKSTQVYGQDVWLPAETLDLIRDYRVAIKGPLTTPVGGGIRSLNVALRQELDLYVCLRPVRYYQGTPSPVKHPELTDMVIFRENSEDIYAGIEWKADSADAEKVIKFLREEMGVKKIRFPEHCGIGIKPCSEEGTRRLVRAALEYAITNDRDSVTLVHKGNIMKFTEGAFKDWGYQLARDEFGGELIDGGPWLKIKNPNTGKEIVVKDVIADAFLQQILLRPAEYDVIACMNLNGDYISDALAAQVGGIGIAPGANIGDECALFEATHGTAPKYAGQDKVNPGSIILSAEMMLRHMQWFEAADLIVKGMEGAIAAKTVTYDFERLMEGAKLLK

SEQ ID NO: 12053 - protein, 744 aa, Geobacillus stearothermophilus
MENQNRQNAAQCPFHGSVTNQSSNRTTNKDWWPNQLNLSILHQHDRKTNPHDEEFNYAEEFQKLDYWALKEDLRKLMTESQDWWPADYGHYGPLFIRMAWHSAGTYRIGDGRGGASTGTQRFAPLNSWPDNANLDKARRLLWPIKKKYGNKISWADLFILAGNVAIESMGGKTIGFGGGRVDVWHPEEDVYWGSEKEWLASERYSGDRELENPLAAVQMGLIYVNPEGPDGKPDPKAAARDIRETFRRMGMNDEETVALIAGGHTFGKAHGAGPATHVGPEPEAAPIEAQGLGWISSYGKGKGSDTITSGIEGAWTPTPTQWDTSYFDMLFGYDWWLTKSPAGAWQWMAVDPDEKDLAPDAEDPSKKVPTMMMTTDLALRFDPEYEKIARRFHQNPEEFAEAFARAWFKLTHRDMGPKTRYLGPEVPKEDFIWQDPIPEVDYELTEAEIEEIKAKILNSGLTVSELVKTAWASASTFRNSDKRGGANGARIRLAPQKDWEVNEPERLAKVLSVYEDIQRELPKKVSIADLIVLGGSAAVEKAARDAGFDVKVPFFPGRGDATQEQTDVESFAVLEPFADGFRNYQKQEYSVPPEELLVDKAQLLGLTAPEMTVLVGGLRVLGANYRDLPHGVFTDRIGVLTNDFFVNLLDMNYEWVPTDSGIYEIRDRKTGEVRWTATRVDLIFGSNSILRSYAEFYAQDDNQEKFVRDFINAWVKVMNADRFDLVKKARESVTALQTLILTPM

SEQ ID NO: 12054 - protein, 353 aa, Catharanthus roseus
MMSRGATRISRSLICQISPRYFSSAAVRGHEPSLGILTSGGTTTFLHGNPGNGSERTALTWIKLPMMRARSASTVATVDQKDKDEKREDKNGVADGENGNKAVVSYWGVEAPKLTKEDGTVWRWTCFRPWETYKPDTDIELKKHHVPVTLLDKVAFFTVKALRWPTDLFFQRRYGCRAMMLETVAAVPGMVGGMLLHCKSLRRFEHSGGWIKALLEEAENERMHLMTFMEVSKPRWYERALVFAVQGVFFNAYFLTYLASPKLAHRIVGYLEEEAIHSYSEFLNELDKGNIENVPAPAIAIDYWQMPPDSTLRDVVMVVRADEALHRDVNHYASDIHYKGLELKEAAAPLDYH

SEQ ID NO: 12055 - protein, 172 aa, Triticum aestivum
MAAPSAALSISGGAHTSAFGCKPKKLISNRNFLQLAAPSNSQNANLYGKLTVCRAESEDSKGGGGFLTGFLIGGAVFGTLGYVFAPQISQTLDTLLNDDGQDGKPDEQGVQSVPRPRNAQYYDEGLEKTRQTLGVKISQLNLAIDKAAARLKRVTGSVEKEAVKDETEVEPL

SEQ ID NO: 12056 - protein, 313 aa, Listeria ivanovii
MRKKFWLKNVLLALLLTAIVVCVNTNLGTKVEAAIIPHPMPIDQIFPDPGLAKAVKEALKKRSVTDVVSQRELDGIRKYLYGNDKDIKSLEGLQCLNNLEELHLSRNQISDLSPLKDLANLTLLCLNDNKLKNLNGIPSAKLVRLLVDGNEITDISSLVHVPQLETLTISKNKLSNIDVLAHLTNLRILDLRNNKVRDLSAIGNLKKLTLLDAAFQNCVNEPVAYKANLVIPNTIKGPDGALVLPTDISDNGEYTNGYVKWKLSAYTKEVSYKYARIIEVGEAEGNFTVTVKQPLYLKALENCQGSFYNCLAK

SEQ ID NO: 12057 - protein, 391 aa, Corynebacterium glutamicum ATCC 13032
MSTLETWPQVIINTYGTPPVELVSGKGATVTDDQGNVYIDLLAGIAVNALGHAHPAIIEAVTNQIGQLGHVSNLFASRPVVEVAEELIKRFSLDDATLAAQTRVFFCNSGAEANEAAFKIARLTGRSRILAAVHGFHGRTMGSLALTGQPDKREAFLPMPSGVEFYPYGDTDYLRKMVETNPTDVAAIFLEPIQGETGVVPAPEGFLKAVRELCDEYGILMITDEVQTGVGRTGDFFAHQHDGVVPDVVTMAKGLGGGLPIGACLATGRAAELMTPGKHGTTFGGNPVACAAAKAVLSVVDDAFCAEVARKGELFKELLAKVDGVVDVRGRGLMLGVVLERDVAKQAVLDGFKHGVILNAPADNIIRLTPPLVITDEEIADAVKAIAETIA

SEQ ID NO: 12058 - protein, 361 aa, Corynebacterium glutamicum ATCC 13032
MTLTLGIVGLPNVGKSTLFNALTRNDVLAANYPFATIEPNVGLVELPDARLERLSEIFGSERILPATVSFVDIAGIVKGASEGEGMGNAFLANIREADAICQVVRAFADENVIHVDGEVNPATDISVINTELILADLQTVEKALPRLEKDARKDKGLGEVVDETKKALAILSDDRTLFSAAKAGDIDLALLRDLHLMTAKPFLYVFNSDEKVLTDDAKKDELRALVAPADCVFLDAQTETELLELEEDEAAELLEAVGQTEPGLHSLARAGFETLGLQTYLTAGPKESRAWTIHKGDTAPQAAGVIHSDFERGFIKAEIVSFEDLDAAGSMAEAKAQGKVRQEGKDYVMVDGDVVEFRFNV

SEQ ID NO: 12059 - protein, 181 aa, Pseudomonas fluorescens PfO-1
MSPEENKMKYRLGDARVETHPQSWVAPNAVLVGKVRLEEGANVWFNAVLRGDNELILIGKNSNVQDGTVMHTDMGYPLTIGTGVTIGHNAMLHGCTVGDYSLIGINAVILNGAKIGKNCIIGANSLIGEGKEIPDGSLVMGSPGKVVRELTEQQKKMLEASAAHYVHNSQRYARDLVEQEE

SEQ ID NO: 12060 - protein, 153 aa, Zea mays
  unsure (1)..(153): unsure at all Xaa locations
FVGEREEMAASDVEYRCFVGGLAWATDDHSLNNAFSTYGEVLESKIILDRETQRSRGFGFVTFSXXDAMRSAIEGMNGKELDGRNITVNEAQSRGGRGGGGGGYGGGRRDGGGYGGGGGGYGGGRGGYGGGGGGYGGGNRGGGYGNNDGNWRN

SEQ ID NO: 12061 - protein, 185 aa, Glycine max
  unsure (1)..(185): unsure at all Xaa locations
PQGIPSPLILLGKSQNALLSIFLFLDQFVWXLGRTGIYQNKERTEPIGPISLYCWLGSSVXTTLVEXGRLGRLSSSMKKLEKDLQEPEXKYDNEQYRAKLNKSNEENFLSTFQSKELNPVVXAVGLLQLAPKXTVLPRVTGAXFGFVSSLIXSCYKLLPCPTQSKLCEMWKNKWFHEVSLLSIII

SEQ ID NO: 12062 - protein, 379 aa, Thermosynechococcus elongatus BP-1
MLRERLRFSWQELSGSFGDLGTDLPLLIGVIIAAQLDSASVFTLFGVAQILTGIVYGLPMPMQPLKAMAVIVMTEKLSGPILWAGGWMVGAMMLVLTLTGILTQLARWIPQPVVRGCQLGLGLSLASIALKTYLPTGDAFGYLLGAIGFLILLLLPKERGIPAGLLVVLLGGGVAMSRVLADPEWHITIAWRFPHLQPLEPQALMPGLLILALPQLPLSIANAVIATQQTAQDLFPDRPLSIGQIGLTYSLTNLILPFFGGVPLCHGCSGLAGHYALGARTGGAVVIYGSFYLVLGLLFGSSVDTLLEVFPLSILGVILLFEAWVLMSFIKDQAPMPENWMITLLVGAIALSVPQGFLVGTLVGTTLHYLSKKMPLQLS

SEQ ID NO: 12063 - protein, 114 aa, Zea mays
MVTKVICFLVLASVLLAVAFPVSALRQQVKKGGGGEGGGGGSVSGSGGGNLNPWECSPKCGSRCSKTQYRKACLTLCNKCCAKCLCVPPGFYGNKGACPCYNNWKTKEGGPKCP

SEQ ID NO: 12064 - protein, 344 aa, Sinorhizobium meliloti
MTNMMKALVKTKPEVGLWMERVPVPEIGPNDVLIRVRKSAICGTDVHIWNWDQWAEKTIPVPMVVGHEFMGEVVEVGPAVSKHHVGERVSGEGHIVCGKCRNCRAGRGHLCRNTLGVGVNRPGSFAEFVCLPEYNVVSIPDDVPDEIAAIFDPFGNAVHTALSFDLVGEDVLVTGAGPIGIMGAMVAKRCGARKVVITDINPVRLDLARKLGIDHVVDASKEKLADVMRVIGMTEGFDVGLEMSGAAPAFRDMIDKMNNGGKIAILGIAPAGFEIDWNKVIFKMLNLKGIYGREMFETWYKMIAFVQGGLDLSPIITHRIGIDDFRDGFEAMRSGNSGKVVMDW

SEQ ID NO: 12065 - protein, 315 aa, Hordeum vulgare subsp. spontaneum
MATAGKVIKCKAAVAWEAGKPLSVEEVEVAPPQAMEVRVKILYTALCHTDVYFWEAKGQTPVFPRILGHEAGGIVESVGEGVTELVPGDHVLPVFTGECKDCAHCKSKESNLCDLLRINVDRGVMIGDGQSRFTINGKPIFHFVGTSTFSEYTVIHVGCLAKINPEAPLDKVCVLSCGISTGLGATLNVAKPKKGSTVAIFGLGAVGLAAMEGARMAGASRIIGVDLNPAKYEQAKKFGCTDFVNPKDHTKPVQEVLVEMTNGGVDRAVECTGHIDAMIAAFECVHDGWGVAVLVGVPHKEAVFKTHPMNFLNEK

SEQ ID NO: 12066 - protein, 152 aa, Oryza sativa
MVKAVVVLGSSEIVKGTIHFVQEGDGPTTVTGSVSGLKPGLHGFHIHALGDTTNGCMSTGPHYNPAGKEHGAPEDETRHAGDLGNVTAGEDGLTWITIYLCQIPLTGPNSIIGRAVVVHADPDDLGKGGHELSKTTGNAGGRVACGIIGLQG

SEQ ID NO: 12067 - protein, 362 aa, Saccharomyces cerevisiae
MTTAVRLLPSLGRTAHKRSLYLFSAAAAAAAAAATFAYSQSHKRSSSSPGGGSNHGWNNWGKPAALASTTPLVHVASVEKGRSYEDFQKVYNAIALKLREDDEYDNYIGYGPVLVRLAWHISGTWDKHDNTGGSYGGTYRFKKEFNDPSNAGLQNGFKFLEPIHKEFPWISSGDLFSLGGVTAVQEMQGPKIPWRCGRVDTPEDTTPDNGRLPDADKDAGYVRTFFQRLNMNDREVVALMGAHALGKTHLKNSGYEGPWGAANNVFTNEFYLNLLNEDWKLEKNDANNEQWDSKSGYMMLPTDYSLIQDPKYLSIVKEYANDQDKFFKDFSKAFEKLLENGITFPKDAPSPFIFKTLEEQGL

SEQ ID NO: 12068 - protein, 753 aa, Geobacillus stearothermophilus
MENQNRQNAAQCPFHGSVTNQSSNRTTNKDWWPNQLNLSILHQHDRKTNPHDEEFNYAEEFQKLDYWALKEDLRKLMTESQDWWPADYGHYGPLFIRMAWHSAGTYRIGDGRGGASTGTQRFAPLNSWPDNANLDKARRLLWPIKKKYGNKISWADLFILAGNVAIESMGGKTIGFGGGRVDVWHPEEDVYWGSEKEWLASERYSGDRELENPLAAVQMGLIYVNPEGPDGKPDPKAAARDIRETFRRMGMNDEETVALIAGGHTFGKAHGAGPATHVGPEPEAAPIEAQGLGWISSYGKGKGSDTITSGIEGAWTPTPTQWDTSYFDMLFGYDWWLTKSPAGAWQWMAVDPDEKDLAPDAEDPSKKVPTMMMTTDLALRFDPEYEKIARRFHQNPEEFAEAFARAWFKLTHRDMGPKTRYLGPEVPKEDFIWQDPIPEVDYELTEAEIEEIKAKILNSGLTVSELVKTAWASASTFRNSDKRGGANGARIRLAPQKDWEVNEPERLAKVLSVYEDIQRELPKKVSIADLIVLGGSAAVEKAARDAGFDVKVPFFPGRGDATQEQTDVESFAVLEPFADGFRNYQKQEYSVPPEELLVDKAQLLGLTAPEMTVLVGGLRVLGANYRDLPHGVFTDRIGVLTNDFFVNLLDMNYEWVPTDSGIYEIRDRKTGEVRWTATRVDLIFGSNSILRSYAEFYAQDDNQEKFVRDFINAWVKVMNADRFDLVKKARESVTALQALDNTDLRGGCTAVSK

SEQ ID NO: 12069 - protein, 249 aa, Thermococcus fumicolans
MPFEIVFDGAKEFADLIATASNLIDEAAFKVTDEGISMRAMDPSRVVLIDLNLPESIFSKYEVEEEETIGINMDHFKKILKRGKGKDTLILKKGDENFLEITFEGTAKRTFRLPLIDVEELELDLPELPFTAKVVLLGEVLKEAVKDASLVSDAMKFIAKENEFSMRAEGETNEVEIKLTLEDEGLLDIEVEEETKSAYGISYLADMVKGIGKADEVTIRFGNEMPLQMDYFIRDEGKLTFLLAPRVED

SEQ ID NO: 12070 - protein, 448 aa, Trichodesmium erythraeum IMS101
MNMNFKSSNPASSLALPPGDLGLPFIGQNKKIFKNPQNFIEEVYQKYGPVYKTNFLGKNFIYFQGYEAIKFILTNENKYFTYSQILRNYQRIFGENDITVLAGKEHRERQKILAKTIKSKNLNNYIDIIHDLSQSYFLKWIKSDYVDLYSEINNYTLDMILKLLLGIDYASKSEISNYLKDMSSGLNTIPVVFPWTKFGSALESKNKLFNQFEQIIVRRKKENNFGSDILGILLTVQEQMNYELTPREIVGQMVNLLSLGKKELSSALSSFFILTSEHLDVLKLLQIEQEKMDVSEPLSLDKYKKMVYLEQVIKEVLRLVPPVSGGLRKIIEDCSFQGFRIPKGWHAYYYISSVLKDPEIYKQPEIFNPERFNPTNAEDKKKPLCYIPFGGGARECIGKEFAYLVIKIFISALLDNCSWKFKENQDLTINTFPVARPAHKIEVCFTPK

SEQ ID NO: 12071 - protein, 379 aa, Pichia pastoris
MSTEGQIIKCKAAVAWEAGKDLSIEEIEVLPPRAHEVRVKVEFTGVCHTDAYTLSGADAEGSFPVVFGHEGAGVVESVGEGVESVKVGDSVVLLYTPECRECKFCLSGKTNLCGKIRATQGKGLLPDGTSRFRCKGKDLFHYMGCSSFSQYTVVADISVVKVQDEAPKDKTCLLGCGVTTGYGAAINTAKISKGDKIGVFGAGCIGLSVIQGAVSKGASEIIVIDINDSKKAWADQFGATKFVNPTTLPEGTNIVDYLIDITDGGFDYTFDCTGNVQVMRNALESCHKGWGESIIIGVAAAGKEISTRPFQLVTGRVWRGCAFGGIKGRTQMPSLVQDYLDGKIKVDEFITHRHDLDNINKAFHDMHAGNCIRAVITMH

SEQ ID NO: 12072 - protein, 352 aa, Nostoc sp. PCC 7120
MKAQVFRGVNQLSYEEIPLPILEPDEVLVQVQVVGLCQSDIKKIRYPLYEPPRIFGHETAGTIAAVGSQVQGWQVGQRVAVMHHIPCMRCAYCMNENFSMCDVYKNISTTAGFNASGGGFAEYVKVPGHIVENGGLIPIPDGISFEEASFVEPTNCCLKAVKKAQIAPGQTVLVTGAGPIGLMFVMLVKYFGAKAIATDLLPSRIEKALNVGAEAAFDARDPDLPAKVHALTNGLGVDVTLLAVPSEKAFFQALECTRKGGKILFFAEFPDELEIPINPNILYRREIDLMGSYSSSYRLQNLSADIVFNRRIDVQALISDRYPLKDLSAAVDQAIAPTPETYKILIYPKIGD

SEQ ID NO: 12073 - protein, 198 aa, Bifidobacterium longum DJO10A
MREWLVEVVRRIKEIGMAVENSKVLIIVNNWGIEETELTRPLRDLKAAGVKVTLAATTLDPCETVQHDRYEGETLTPDARLSDVQAADYDLLVVPGGTCNVDRIRVNEDAITLAQEFAHEGKPIAAICHGAWLLVNAGLVAGKTAAPCRYIAADIENAGGHYVDEQLHVDDANGFKLITSRKPDDLDYFVGAIKDALK

SEQ ID NO: 12074 - protein, 168 aa, Prochlorococcus marinus subsp. marinus str. CCMP1375
MESYLNSPVPIEQRPSDEFTQLTNSLFFSWPTKSINNFIKKLFLTWIISFPFFIIISTGSYTLRLNIFNLISLSFLSSIIIPILILLRQLWGWDYVYKRLLSKTITYEESDWHDGKDWEKPSSWLLRDKLIASQEVLPIISKIKTTTKYLLILFIFLLTSYFFYIRIN

SEQ ID NO: 12075 - protein, 877 aa, Streptococcus agalactiae 2603V/R
MKGQKIIALAGLVLSCHFALTACHTQEHKNSHHIKTKQVAKKKANKKKVSVKESHKKRKGVAGVDFPTDDGFLLTKDSKILSHTDSGIVVAHGNHSHFIFYSDLKGSKFSYLIPNANTKTNKNQAVRNFKAGAVAVNTLNDGYVFNPADIVSEDANGYVVRHGDHFHYIPKASLSQQKQVQASRAVSRLGNQSNSHYRVNSSKIAGLHYPTSNGFLFNGRGIKGTTPTGILVEHHNHLHFISFADLRKGGWGSIADRYQPQKKADSKKQSPSSKKPRTENTLPKDIKDKLAYLARELHLDISRIRVLKTLNGEIGFEYPHDDHTHVIMAKDIDLSKPIPNPHHDDEDHHKGHHHDESDHKHEEHEHTKSNKLSDEDQKKLIYLAEKLGLNPNQIEVLTSEDGSIIFKYPHDDHSHTIASKDIEIGKPIPDGHHDHSHAKDKVGMATLKQIGFDDEIIQDILHADAPTPFPSNETNPEKMRQWLATVTKINIGQRTNPFQRFGLSLMPNIEVLGIGFTPINDMTPVLQFKKLKQLWMTNTGITDYSFLDKMPLLEGLDISQNGIKDLSFLTKYKQLSLIAAANNGITSLKPLAELPNLQFLVLSHNNISDLTPLSNLTKLQELYLDHNNVKNLSALSGKKDLKVLDLSNNKSADLSTLKTTSLETLLLNETNTSNLSFLKQNPKVSNLTINNAKLASLDGIEESDEIVKVEAEGNQIKSLVLKNKQGSLKFLNVTNNQLTSLEGVNNYTSLETLSVSKNKLESLDIKTPNKTVTNLDFSHNNVPTSQLKLNEKNIPEAVAKNFPAVVEGSMVGNGSLAEKAAMASKEDKQVSDNTNHQKNTEKSAQANADSKKENPKTHDEHHDHEETDHAHVGHHHH

SEQ ID NO: 12076 - protein, 373 aa, Paspalum simplex
ALFVAGGLQAHKLAVRAISRLQALPGGDVKLLCDTVVELVRDLTGYDRVMVYRFHEDEHGEVVAESRRENLEPYLGLHYPATDIPQASRFLFRQNRVRMIDDCHATPVRVIQDPGLSQPLCLVGSTLRAPHGCHAQYMATWVQLHRLLWQSSFGGDDEQTRGGISSAMKLWGLVVCHHTSPRFIPFSLRYACEFLMQAFGLQLNMELQLARQLSEKHILRTQTLLCDMLLRDSPTGIVTQSPSIMDLVKCDGAALYYHGKYYPWGVTPTESQIKDIIEWLTVCHGDSTGLSTDSLADAGYLGAAALGDAVCGMAVAYITPSDYLFWFRSHTAKEIKWGGAKHHPEDKDDGQRMHPRSSFKAFLEVVKSRSLPW

SEQ ID NO: 12077 - protein, 466 aa, Escherichia coli O157:H7
MGQSSQPHELGGGLKSRHVTMLSIAGVIGASLFVGSSVAIAEAGPAVLLAYLFAGLLVVMIMRMLAEMAVATPDTGSFSTYADKAIGRWAGYTIGWLYWWFWVLVIPLEANIAAMILHSWVPGIPIWLFSLVITLALTGSNLLSVKNYGEFEFWLALCKVIAILAFIFLGAVAISGFYPYADVSGISRLWDSGGFMPNGFGAVLSAMLITMFSFMGAEIVTIAAAESDTPEKHIVRATNSVIWRISIFYLCSIFVVVALIPWNMPGLKAVGSYRSVLELLNIPHAKLIMDCVILLSVTSCLNSALYTASRMLYSLSRRGDAPAVMGKINRSKTPYVAVLLSTGAAFLTVVVNYYAPAKVFKFLIDSSGAIALLVYLVIAVSQLRMRKILRAEGSEIRLRMWLYPWLTWLVIGFITFVLVVMLFRPAQQLEVISTGLLAIGIICTVPIMARWKKLVLWQKTPVHNTR

SEQ ID NO: 12078 - protein, 473 aa, Bacillus anthracis str. A2012
MMNQNQGLKRELKSRHIFMIALGGVIGTGLFLGSGYTIHEAGPGGAIVAYLVGGFVMYLTMLCLGELAVAMPDAGSYQTYATKHISPAAGYVVGWMSWLNWSATIGIELIAVSILMKRWFPDVPSWIWCVVFAVLLFAINALSSRSFAEVEFWFASIKVITIIAFIILGGAAMFGFLDMKGNEPAPMFSSFTDYGGLFPNGLSAILITMIAVNFSFQGTELVGIAAGESENPEKTIPKAINNTVWRILVFFVLSIFILAGLFPWQQAGVIESPFVVVFDKIGIPYAADIINFVIITAVLSVANSGLYATSRMLWSMSNQGMISPIFGKLSKNGVPIYALIVSTIVGCLSLLSGIYAEDTVYLWLLSIAGFGAILVWASIALSNLLARRSYIKQGGDVKDLKFKTPLYPFVPLLALVLNVTVIVGMAFIPEQRMALYCGIPFMIVCLLFYRATRNKAHKVEHIEKTDTTEVDSL

SEQ ID NO: 12079 - protein, 200 aa, Pinus sylvestris
MSSVLTDLLNLDLSDLTEKVIAEYIWIGGSGMDMRSKARSLSGPVSSVKELPKWNYDGSSTGQAQGHDSEVILYPQAIFRDPFRRGKHILVICDAYSPNGTAIPSNKRAAAAKIFNEKAVSDEETWYGLEQEYTLLQKDVKWPLGWPIGGYPGPQGPYYCGVGADKAWGRDIVDAHYKACLYSGINISGINGEVMPGQWE

SEQ ID NO: 12080 - protein, 326 aa, Zea mays
MEHTKSGPSSWPELADVVPVPQDDGPSPVVSIAYRDDFREVMDYFRALYLTGERSPRALRLTAEAIELNPGNYTVWHFRRLILESLDFDLLEEMKFVEKIAECNPKNYQIWHHKRWLAEKLGPGIANKEHEFTMKILAIDAKNYHAWSHRQWVLQALGGWETELEYCDHLLKEDVFNNSAWNQRYFVITRSPFLGGLAAMRDSEVDYTIEAILANAQNESPWRYLKGLYKGENNLLIEDERISGVCFKVLKNDWTCVFALSLLLDLLCTGLQPSDELRSTLETIRSSHPETTDADPAAAVCCILQKCDPLRVNYWSWFKDTLSQIS

SEQ ID NO: 12081 - protein, 249 aa, Rosa rugosa
MAYENKPNTVLDSDAQRRLGRGKIEIKRIENTTNRQVTFCKRRNGLLKKAYELSVLCDAEVALIVFSNRGRLYEYSNNSSVRETIERYKKACADSSNNGSVSEATTQYYQQEAAKLRAQITTLQNSNRGYMAEGLSNMSIKELKGVETKLEKAISRIRSKKNELLFAEIEYMQKRELDLHNNNQLLRAKIAENERHQQSINAIAGGHGSYDIMQPTQPFHEARNYFQVNALQPNIHQYSRHDQISLQLV

SEQ ID NO: 12082 - protein, 450 aa, Oryza sativa
  unsure (1)..(450): unsure at all Xaa locations
MDPSSAGAGGNSLASASCGDAQKRRVCYFYDPEVGNYYYGQGHPMKPHRVRMTHALLAHYGLLAQMQVLRPLPARDRDLCRFHSDDYVAFLRAVTPETQFDQIRSLRRFNVGEDCPVFDGLYAYCQTYAGASVGAAVKLNHGTHDIAINWSGGLHHAKKSEASGFCYVNDIVLAILELLKLHERVLYIDIDIHHGDGVEEAFYTTNRVMTVSFHKFGDYFPGTGDIRDIGYSEGKYYCLNVPLDDGIDDDSYQSIFKPIISKVMEMYRPGAVVLQCGADSLSGTPVXLQLWFYPLTVYLVFYLAXTGVALGEELREKLPYNEYYEYFGPEYSLYVAASNMENRNTNKQLEEIKCNILDNLSKLQHAPSVQFEERIPETKLPEPDEDQDDPDERHDPDSDMLLDDHKPMGHSARSLIHNIGVKREITETETKDQIGAALVXDDDEPAPALX

SEQ ID NO: 12083 - protein, 356 aa, Streptococcus pneumoniae
MRGKTILITGVAGFIGSNLVRKLLELEGTMTIIGLDNLNDYYDIALKDYRLLQLNKLIQDYPEKNWIFIKGDIADKMLINKIFKSYHPQIVVNLAAQAGVRYSITNPDVYIESNIVGFHNVLEACRHSYEIYDGGVEHLVYASSSSVYGGNKKIPFATEDKVDNPISLYAATKKTNELQAYAYSKIYNIPSTGLRFFTVYGPAGRPDMAYFGFTDKLRSGSDIEIYNHGNCKRDFTYIDDIVEGIVRVMQSAPKKLVGSDNLPLAPYKVYNIGNSKPENLLDFVDVLQQELIKAGVLPENYDFDSHKKLVPMQPGDVPVTYADTSDLERDFGFKPKTSLREGLRKFAEWYKDYYNV

SEQ ID NO: 12084 - protein, 310 aa, Mycoplasma genitalium
MNLYDLLELPTTASIKEIKIAYKRLAKRYHPDVNKLGSQTFVEINNAYSILSDPNQKEKYDSMLKVNDFQNRIKNLDISVRWHENFMEELELRKTWEFDFFSSDEDFFYSPFTKNKYASFLDKDVSLAFFQLYSKGKIDHQLEKSLLKRRDVKEACQQNKNFIEVIKEQYNYFGWIEAKRYFNINVELELTQREIRDRDVVNLPLKIKVINNDFPNQLWYEIYKNYSFRLSWDIKNGEIAEFFNKGNRALGWKGDLIVRMKVVNKVNKRLRIFSSFFENDKSKLWFLVPNDKQSNPNKGVFNYKTQHFID

SEQ ID NO: 12085 - protein, 163 aa, Zea mays
  unsure (1)..(163): unsure at all Xaa locations
CRARKAVNIPCPADQSLCLVSVGVEFEKDAINILNITHILIVEQSQDASCRISNLITTRSNVLDIPDTDXLLKHSDECFGFIDEAISSGGNVLVHCFAGRSRSVTIVVAYLMKKHQMSLESALSLVRSKRPQVAPNGGFISQLEKFQKSLQVEQERRMQPVQH

SEQ ID NO: 12086 - protein, 162 aa, Oryza sativa
  unsure (1)..(162): unsure at all Xaa locations
MAQESWKNESEETVHTPEAPILCVNNCGFFGSSMTNNMCSKCYRDFVKVTTMAAPVVEXXKAFTPASSSKTPLEPAKPDEVPAAAVEDKQAAQEPPKPPSNRCLSCRKKVGLTGFQCRCGGTFCSTHRYTEAHDCTFDYKKAGRDQIAKQNPVVIAEKINKI

SEQ ID NO: 12087 - protein, 164 aa, Catharanthus roseus
MASADVEYRCFVGGLAWATTDQSLSEAFSQYGEILESKIINDRETGRSRGFGFVTFKDEQSMRDAIEGMNGQTLDGRNITVNEAQSRGSGGNGGGGFRGPRRDGGGGGGYGGGRRDGGYGGNGGYGGGRREGGYGGGDRGYGGGGGGGSRYSRGGGASDGNWRN

SEQ ID NO: 12088 - protein, 292 aa, Oryza sativa
  unsure (1)..(292): unsure at all Xaa locations
MSGGRQSYWCYQCRQRVRPRGQDMECPYCDSGFVSEMDDVDALMRHFVGMDPDFHRDPRFGIMEAISAVMRHGMAGTNREVDVRGRPNIFSDLEMEFGSGPWLLFRGQLPGHLSEDNGFDVFINGRRGVGMRRANIADYFVGPGLDDLIEQLTQNDRRGPPPATQSSIDAMPTVKITQRHLSGDSHCPVCKDKFELGSEAREMPCKHLYHSDCIVPWLEQHNSCPVCRYELPPQSSTGASCSRTRSTNQSQSSSSNGRTNGRQRRRNPFSFLWPFRSSSSSSLSTSXVRLAW

SEQ ID NO: 12089 - protein, 496 aa, Xylella fastidiosa Ann-1
MTHATIYQGEERRMLKKHLFIVKPIEPTNHTGTGKGGTQLKRSLTAGQLVMLGIGAVIGAGIFVLSGHAAAEYAGPAVVLSYILAGIACALAGLCYAEFAAMLPVSGSAYSYAYATLGEFTAWFIGWNLILEYMFSASTVAVGWSGYLNSFLSSFGYGLPASLSSAPLDVVDGRLIYSGGLINLPAVAIVAAISGLCYVGITQSAFVNSITVAIKVSVIVLFIAFAARYVNPDNWVPFVPDNVAPGKYGIEGVIRGAAVVFFSYIGFDAVSTTAGEAKNPQRDMPIGILGSLAICTVIYIAFSGVLTGLMHYSQLDTPKPVATALETYPTLSWLKHVVEIGAIAGLSSTMLMMLMAQPRIFYAMSQDGLLPKLLSKVHPKFQTPHVGTLIVGACACALAGLFPISLLGDLVSMGTLLAFATVCIGIVVLRRTRPDLPRPFRVPMYWVIAPTGAAACLYLFWQPFTEHWPLMVGWTVLGLVMYGLYGYHHSKLRHGG

SEQ ID NO: 12090 - protein, 64 aa, Zea mays
  unsure (1)..(64): unsure at all Xaa locations
MARLRPEPIDRETTCPMLXRVFTGAGGHHQHEQLFVRGKQPXDEGQIYTWKDATLRELTELAKE

SEQ ID NO: 12091 - protein, 469 aa, Leuconostoc mesenteroides subsp. mesenteroides ATCC 8293
  unsure (1)..(469): unsure at all Xaa locations
MSQQKNATMNADGTIRGLKKKHVQMIAIGGTIGTGLFLGAGNSIAKTGPSILIVYAVLGAFFFMMMRGIGEMLYADPSQHTFVSFISKYVGAGAGYFAGWSYWIGLLFVAMAELTAVSTYVKFWFPSWKTWIIQILFLFVLTMINLIAVRVFGETEYWFAMIKIIAIVAMIVTGLILIFTGFKAPASGGHTVASFSNVFSNFSLFPNGASMFFAAFPMVFFAFQGMEFVGITTAETENPREVLPKAINTIIIRILIFYLGAMIIIMSIINWHVIAKTPESSPFVMVFQLAGFKAAATIINFVVLTSAASALNSAIYSAGRHFYQLAEESDSKFMINFREISSNGVPAKAIIFTAILVLISPVINSIPQITSAFGLITSISSNMYIIVYAMTMYAHRKFRESTNFMPDGFLMPGYKWTSPLTLLFFVSIYASLFFQADSRVAAIGAILFTIVXXXXXXXXXXXXXXXXXQ

SEQ ID NO: 12092 - protein, 170 aa, Triticum aestivum
MDLQQVMEHQLFDDGAVPSCMISPLEADNGFTDELPSLQLPDLDLDFDIHEFSAPATAPAKAASSGGSGLVGSGSGSHKKLNHNAYERDRRTQLNQLYSTLRSLIPNADHTKKLSIPTTVCQVLDYIPKLQKQVEDLKKKKQELSTAKCRERLQRVKDNTCRIVSATPLD

SEQ ID NO: 12093 - protein, 167 aa, Citrus sinensis
MASQSKTSVHDFTVKDAKGQDVDLSIYKGKLLLIVNVASQCGLTNSNYTELSSLYDKYKNQGLEILAFPCNQFGAQEPGDNEQIQEFACTRFKAEFPIFDKVDVNGDNAAPLYKHLKSSKGGLFGDSIKWNFSKFLVDKEGNVVERYAPTTSPLSIEKDIKKLLETA

SEQ ID NO: 12094 - protein, 186 aa, Shewanella oneidensis MR-1
MANILIIAGDFVEDYELMVPFQALQMVGHSVTVVCPDKVAGQTIKTAIHDFEGDQTYTEKPGHLFALNGNFAGANASDFDALLLPGGRAPEYLRLNPAVIALVADFSAQDKPIAAICHGAQLLTAADVVRGKKVSAYPACAPEVKQAGAEYCDIEVTAAITDGKLVTAPAWPAHPAWLAQFNKLLN

SEQ ID NO: 12095 - protein, 148 aa, Oryza sativa
  unsure (1)..(148): unsure at all Xaa locations
MVNLRTQKRLASAVIGCGERKIWLDPNEQSEISNANSRQTIRKLISDGLIIRKPVTQHSRSRARELNLARREGRHRGYGKRKGTADARMPSQVLWMRRLRVLRRLLATYRASGKIDKHLYHELYHSSKGNAFKHQRALVDHIHRAKAX

SEQ ID NO: 12096 - protein, 135 aa, Triticum aestivum
  unsure (1)..(135): unsure at all Xaa locations
RERISFRSFVNNPGRSLSRNRINFGTNSALLEVGQVALAEDGFQKTPLSGLKGGAXDGFSFPRSFPRAXRPVTDPAXICSTRMWCGRSKASKIAVPVADPHKASRRRELGERVLEERMPGDHADDAEAPAHSAED

SEQ ID NO: 12097 - protein, 128 aa, Zea mays
MNHHQAQPVRTGDVYPPTAVKREASHERDKIIEQGDQRGGALHVDQTDLPAGRRMVTASAGGQVMAQFTVPVPDTKVAEATDAVTLGEALHAAAQTSAGDKPVDLADAAALQAAEARATGLGGNVRGG

SEQ ID NO: 12098 - protein, 186 aa, Zea mays
MAYLLRTAGRSRAILPRVNAHTASRVPTALNRRYATAAAAVATDSGEQSFFPDEPKQPIVKTQIPGPNSQKAIEKLGKVFDIRSLNMMADYSRSYGNYIADLDGNVLLDVYAQIASIPVGYNNPSLLLAATSPEMASAIINRPALGNFPQHDWADILESGILSVAPKGLNQVFTAQAGSDANELAY

SEQ ID NO: 12099 - protein, 377 aa, Rhodopseudomonas palustris
MRAIFRVREPDDRQCRPDTAVPARRRSDRSRARVAVAEPGVGVVVVVRAARGARLHQAARDRTARQWRRRGCLQGHAGAFVAAVRARRCGGDPAARYDHHPRYCDHAGPGRLGAYHAGGHGGDIRGGGAAAGNVGTPMNANPFSLWVYLSQTPLLWLTVTLLVYAATDAVSQATGRNPLVNPVLHAMWIIGVFLWATGTSYTTYFSGAQFVHFLLGPATVALAVPLYENRKLVLAAILPMALALVVGCVTAIVSVVWLAQLAGLPETVVLSLAPKSVTAGVAMGISESLHADPSLTAVAVILTGILGAIVVSPLMNRLGIRDYRARGFAVGLASHGIGTARAFQVDAIAGVFAGIAMSLNALITALLVPVLVTLLVR

SEQ ID NO: 12100 - protein, 366 aa, Zea mays
  unsure (1)..(366): unsure at all Xaa locations
MSCFACCGDEDTQVPDTRAQYPGHHPARADAYRPSDQPPKGPQPVKMQPIAVPAIPVDEIREVTKGFGDEALIGEGSFGRVYLGVLRNGXGVAAVKKLDSNKQPDQEFLSXQVSMVSRLKHENXVELLGYCXDGTLRVLAYEFATMGSLHDMLHGRKGVKGAQPGPVLXWSQRXKIAVGAAKGLEYLHEKAQPHIIHRDIKSSNVLSFDDDVAKIADFDLSNQXAPDMAARLHSTRVLGTFGYHAPEYAMTGQLSSKSDVYSFGVVLLELLTGRKPVDHTLPRGQQSLVTWATPXLSEDKVRQCVDSRLGGDYPPKAVAKFAAVAALCVQYEADFRPNMSIVVKALQPLLNAACAGRPNPGEHAGS

SEQ ID NO: 12101 - protein, 504 aa, Listeria monocytogenes
KPLANLKNLGWLFLDENKIKDLSSLKDLKKLKSLSLEHNGISDINGLVHLLQLESLYLGNNKLTDITILSRLTKLDTLSLEDNEISDIVPLSGLTKLQNLYLSKNHISDLRALAGLKNLDVLELFSQECLNKSINHQTNLVVPNTVKNIDGSLVTPEIISDDGDYEKPNVKWHLPEFINEVSFIFYQPVTVGKAKARFHGRVTQPLKEVYTVSYDVDGTVIKTKVEAGTRITAPKPPTKQGYVFKGWYTEKNGGHEWDFSTDYMSGNDFTLYAMFKVETTEKAVNLTRYVKYIRGNAGIYKLPREDNSLKQGTLASHRCKALTVDREARNGGKLWYRLKNIGWTKAENLSLDRYDKIEYDKGVTAYARVKNALGNAVWTKPYNTAGAKHVNKLSVYQGKNMRILREAKTPITTWYQFSIGGKVIGWVDTRALNTFYKQSMEKPTRLTRYVSASKGNEAYYKVPVADNPVKRGTLAKYKNQKLIVDCQATVEGQLWYRIRTSSTF

SEQ ID NO: 12102 - protein, 208 aa, Gossypium klotzschianum
VYYWECKGYTPLFPRILGHEASGIVESVGEGVNDLKPGDHVLPIFTGECKECRHCLSEESNNMCELLRINCDRGVMLADGKTRFSINGKPIYHFVGTSTFSQYTVVHVGQVAKISPTAPLDKVCPISCGICTGFGATVNVAKPKKGQTVAVFGLGAVGLAAAEGARVCGASRIIAVDVNPRRFEEAKRFGITEFVNPKDYDKPVQEVI

SEQ ID NO: 12103 - protein, 404 aa, Mycobacterium leprae
MTPTQTNTATMQQRWETVMMNNYGTPPIVLASGNGAVVTDVDSNTYLDLLGGIAVNVLGHRHPAVIEAVTHQITTLGHTSNLYATEPSITLAEELVALLGADTQTRVFFCNSGTEANELAFKLSRLTGRTKLVAAQAAFHGRTMGSLALTGQPAKQAAFEPLPGHVTHVPYGQVDALAAAVDNDTAAVFLEPIMGESGVIVPPEGYLAAARDITTRHGALLVIDEVQTGIGRTGAFFAHQHDSITPDVVTLAKGLGGGLPIGAFLATGPAAELLTLGLHGSTFGGNPVCTAAALAVLRVLATQGLVRRAEVLGDSMRIGIESLSHPLIDQVRGRGLLLGIVLTAPRAKDIEKAARDAGFLVNATAPEVIRLAPPLIITESQIDSFITALPGILDASIAELGKKA

SEQ ID NO: 12104 - protein, 476 aa, Mycobacterium tuberculosis H37Rv
MPTTSMSLRELMLRRRPVSGAPVASGASGNLKRSFGTFQLTMFGVGATIGTGIFFVLAQAVPEAGPGVIVSFIIAGIAAGLAAICYAELASAVPISGSAYSYAYTTLGEAVAMVVAACLLLEYGVATAAVAVGWSGYVNKLLSNLFGFQMPHVLSAAPWDTHPGWVNLPAVILIGLCALLLIRGASESARVNAIMVLIKLGVLGMFMIIAFSAYSADHLKDFVPFGVAGIGSAAGTIFFSYIGLDAVSTAGDEVKDPQKTMPRALIAALVVVTGVYVLVALAALGTQPWQDFAEQETAGLAIILDNVTHGEWASTILAAGAVVSIFTVTLVTMYGQTRILFAMGRDGLLPARFAKVNPRTMTPVHNTVIVAIFASTLAAFIPLDSLADMVSIGTLTAFSVVAVGVIVLRVREPDLPRGFKVPGYPVTPVLSVLACGYILASLHWYTWLAFSGWVAVAVIFYLMWGRHHSALNEEVP

SEQ ID NO: 12105 - protein, 756 aa, Claviceps purpurea
MKFLAVSSILFASSLAVPTSHGGGSCRPRRPPPVNYPGGDYPGGQGGDKPPGGGYPGTTYPGGDYPGGDHPGGYGGGGYGGGDYPGGDYPGGDYPGGDYPGGDYPGGDYPGGNHGGGNHGGGNGGNNGGGNGGGNGGGGNNGNGTDPGGNNGGGNGGGGNVPYKPCPSGLYSNPQCCSTNVLGVAALNCKTPSFAPTSFQSFKSACSGGQPQCCVVPAAGQGVLCQAPIGGGNGGNNGGNNGGNNGGNNGGNNGGNNGGNNGGNNGGNGGNGGNNGGNNGGNGGNNGGNGGNGGDGGDYSACPSGLYSNPQCCATDVLGVASLDCVNPSSKPRSGDDFKSTCGAEGKHASCCAIPVAGQGVLCQPAMGGGGNGGNNGGGNGGNGGNGGNGSNDGGNGGNGGNNGGNNGGNGGNGGDGGDYSACPSGLYSNPQCCSTDVLGVASLDCVNPSSKPRSGDNFKSTCAAAEKHASCCVIPVAGQAVLCQPAMGGGGNGGNNGGNGGNNGGNNGGNNGGNNGGNNGGNNGGNNGGNGGNGGNNGGNNGGNGGNGGNNGGNNGGNGGNGGGNGGDYSACPSGLYSNPQCCSTDVLGVASLDCVNPSSKPRSGDNFKSTCAAAGKHASCCVIPVAGQGVLCQPAMGGGGNGGNNGGGNGGNGGNNGGNNGGNGGNNGGNNGGNGGNNGGNGGGSHEVCPSGLYSVPQCCATGLLGVLDLDCQSPSRTSFSSSDFKSTCRSEGRKARCCVLPVAGQDVLCTNPL

SEQ ID NO: 12106 - protein, 423 aa, Vibrio parahaemolyticus RIMD 2210633
MTNQQLHQRRSQVIAQGMGALYPLYVEKAENAYVWDIEGNKYIDFAAGIAVTNTGHSHKRISEAVKAQLDNFSHTCAMVTPYASFVELAEKLTELAPGETKKKAIFLTTGAEAVENAVKVARAHTGRSGVIAFKGGFHGRTNMTMGLTGKVAPYKAGFGPFPNEIYHAPYPNAFHGISVEQSLQAIDDLFACDIEPSRVAAIIFEPVQGEGGFYKAPDAFAQGLRQLCDKHGIMLIADEIQTGFARTGKMFATEYLGIEPDLMTMAKGIAGGFPISAVVGKADVMDSALPGGLGGTYAGSPLGCVAGLEVLKIIEEEDLCAKAMGIGEVVNARMTKLQQSVPAIGEIRTTGAMMAIEFTDPESGKPLQEMTKAVISKAQENGLILLSCGVKANVIRLLPPLTIEPEVLSEGLDKLEKVILEVA

SEQ ID NO: 12107 - protein, 153 aa, Triticum aestivum
KKKRACLPYLLPLHNMWSHADAVYQLHPYLQQFGLFYAFIDTMALVPGWLFLMIFMTVYFFVVRRKWSPHFLRYHIILAILLDTGSQALATMCNWNPSIVFQGKPMAYFWMTLAFIQIFTVVECMRCALSGMYPNVPFISHTAFIHSDLNLFR

SEQ ID NO: 12108 - protein, 1128 aa, Oryza sativa; identical to SEQ ID NO: 1814

SEQ ID NO: 12109 - protein, 543 aa, Candida tropicalis
MSSSPSIAQEFLATITPYVEYCQENYTKWYYFIPLVILSLNLISMLHTKYLERKFKAKPLAVYVQDYTFCLITPLVLIYYKSKGTVMQFACDLWDKKLIVSDPKAKTIGLKILGIPLIETKDPENVKAILATQFNDFSLGTRHDFLYSLLGDGIFTLDGAGWKHSRTMLRPQFAREQVSHVKLLEPHMQVLFKHIRKHHGQTFDIQELFFRLTVDSATEFLLGESAESLRDESVGLTPTTKDFDGRNEFADAFNYSQTNQAYRFLLQQMYWILNGSEFRKSIAIVHKFADHYVQKALELTDEDLEKKEGYVFLFELAKQTRDPKVLRDQLLNILVAGRDTTAGLLSFLFFELSRNPEIFAKLREEIENKFGLGQDARVEEISFETLKSCEYLKAVINETLRIYPSVPHNFRVATRNTTLPRGGGEGGLSPIAIKKGQVVMYTILATHRDKDIYGEDAYVFRPERWFEPETRKLGWAYVPFNGGPRICLGQQFALTEASYVTVRLLQEFGNLKQDPNTEYPPKLQNTLTLSLFEGAEVQMYLIL

SEQ ID NO: 12110 - protein, 348 aa, Lactobacillus gasseri
MAFLLKELHVAHKYLYHLNVIVCMKIEKIKKMKTTKLGKTSLDIPALALGVMRMGTRTPEEGAAAINVAYEAGVNFIDSADIYGRGNSEKVFGKALKLSDVKREDLFIQSKTGIVVGPNGSHGSLVYGSRYEFTKEHILNAVDGILKRMDIDYLDCLVLHRPDVLMDLEVIKQAFDVLQATGKVRFFGVSNFNPAQFKMLQNAVSQPLMFDQVQFGLMHTGMIDFGLHTNMTDDASINHDGSLLEFLRMNHITLQAWSPFQYGTFEGTFINNPAFPELNKKLQEIGDKYGVGKNAVAAAWILRWPGQVQVIMGTMTPAHIVDSAKGADIELTNQEWYDLYFAAGHDLP

SEQ ID NO: 12111 - protein, 355 aa, Burkholderia fungorum
MKIAVLPGDGIGPEIVKEAVKVLNVLGEKFELEEAPVGGAGYEAKGHPLPDSTLALAKEADAILFGAVGDWKYDSLERALRPEQAILGLRKHLQLFANFRPAICYPQLTGASSLKEEIVSGLDILIVRELNGDIYFGSPRGVREAPDGLFAGSKEGFDTMRYSEPEVRRIAHVAFQAAQKRGKKLTSVDKANVLETSQFWKDVMIDVSKEYADVELSHMYVDNAAMQLVKAPKSFDVIVTGNMFGDILSDEAAMLTGSIGMLPSASLDKNNKGLYEPSHGSAPDIAGKGVANPLATILSAAMMLRYSLNKAEQADRIENAVKKVLEQGYRTGDIVTPGCKQVGTVAMGDAVVAAL

SEQ ID NO: 12112 - protein, 524 aa, Trifolium pratense
MLLEIAVALLVIALFIYLRPTPTAKSKALRHLPNPPSPKPRLPFIGHLHLLDHPLLHISLIRLGERYGPLYSLYFGSMPTVVASTPDLFKLFLQTHEATSFNTRFQTSAIRRLTYDNSVAMVPFGPYWKFVRKLIMNDLLNATTVNKLRPLRSKEIRKVLNVMANSAETQQPLNITVELLKWTNSTISTMMLGEAEEVRDIARDVLKIFGEYSVTDFIGPLKIFKKFGNYEQRIDAIFNKYDPIIERVIKKRQGIVNKRKNGEVLVGEEENVVFLDTLLEFAQDETMEIKITKEQIKGLVDFFSAGTDSTAVATEWTLAELINNPRVLKKAREEVESVVGKDRLVDESDIQNLPYIRAMVKEVFRLHPPLPVVKRKCTEECEINGYVIPEGALILFNVWQVGRDPKYWEKPLEFRPERFLENAGVGEGEASSIDLRGQHFTLLPFGSGRRMCPGVNLATAGMATLLSSIIQCFDLQVPGPNGQILKGSDAKVTMDERPGLSVPRAQNLVCVPLARAGAAKLLSS

SEQ ID NO: 12113 - protein, 96 aa, Zea mays
  unsure (1)..(96): unsure at all Xaa locations
LQGQMEHDYDIGTTIRDKIIPHAVSWFTGEAVQGEDFANLGDDDDDDEDEDDDDEEEDEDEEXDEEEESKPARKLAAGSVAALQGNAEQPAECKQR

SEQ ID NO: 12114 - protein, 93 aa, Zea mays
MLEGKAVVEDTDMPAKMQAQAMSAASRALDRFDVLDCRSIASHIKKEFDAIHGPGWQCVVGSGFGCYITHSKGSFIYFRLESLRFLVFKGAAA

SEQ ID NO: 12115 - protein, 168 aa, Zea mays
NVVVLADYAIMYESHPASHPTVAVKVTSPYGNTVHHNENATTGQFAFTTSEAGNYLACFWIDSVEKGSGTSLNLDWKIGIAAKDWDTIAKKEKIEGVELELRKLEAAVESIHHNLLYLKAREADMRTVSERTNSRVAWFSILSLGVCVAVSVLQLWHLQGFFRKKKLI

SEQ ID NO: 12116 - protein, 249 aa, Pseudomonas syringae pv. syringae B728a
MQQLKQKRAVITGAGSGIGAAIARAYAAEGARLVLGDRDADSLAKIAAECRQLGAQVQECVADVGSVDGAQASVDACVEQFGGIDILVNNAGMLTQARCVDLTLDMWNDMLRIDLTSVFVASQRALPHMIAQRWGRIINVASQLGIKGGAELTHYAAAKAGVIGFSKSLALEVAKDNVLVNAIAPGPIETPLVAGISSAWKTAKAAELPLGRFGLAEEVAPVAVLLASEPGGNLFVGQTLGPNSGDVMP

SEQ ID NO: 12117 - protein, 350 aa, Cyamopsis tetragonoloba
MSSQTVLVTGGAGYIGSHTVLQLLLGGFKAVVVDNLDNSSETAIHRVKELAGKFAGNLSFHKLDLRDRDALEKIFSSTKFDSVIHFAGLKAVGESVQKPLLYYDNNLIGTIVLFEVMAAHGCKKLVFSSSATVYGLPKEVPCTEEFPLSAANPYGRTKLIIEEICRDIYRAEQEWKIILLRYFNPVGAHPSGYIGEDPRGIPNNLMPFVQQVAVGRRPALTVFGNDYTTSDGTGVRDYIHVVDLADGHIAALRKLNDPKIGCEVYNLGTGKGTSVLEMVKAFEQASGKKIPLVMAGRRPGDAEVVYASTNKAERELNWKAKYGIDEMCRDQWNWASKNPYGYGGSEDSSN

SEQ ID NO: 12118 - protein, 118 aa, Triticum aestivum
  unsure (1)..(118): unsure at all Xaa locations
MMESQPLRAPRAEPHGARAADDQPGAGAPPAVVPGKEFTRTCKGLVVVLIGGYVLLQLLPSSXNYFXIIXAKTIPXVWTVFTAGYIEHXLXGAIGXPLXLXXXGKVLXPIWGXKXFLX

SEQ ID NO: 12119 - protein, 106 aa, Zea mays
MAKNPKDAAPEEEMPAAAEEQAAPAATVKVLFFARARDLTGVADSAVEVPPGSTAGECLARVLAQFPKLEEIRGSVVLALNEEYAADSAAVADGDELAVIPPISGG

SEQ ID NO: 12120 - protein, 375 aa, Sinorhizobium meliloti
MDARAAVAIQAGKPLEVMTVQLEGPRAGEVLVEVKATGICHTDDFTLSGADPEGLFPAILGHEGAGIVVDVGPGVTSVKKGDHVIPLYTPECRSCPSCLSRKTNLCTAIRATQGQGLMPDGSSRFSINGDKIHHYMGCSTFSNFTVLPEIALAKVNPDAPFDKICYIGCGVTTGIGAVINTAKVEIGATAIVFGLGGIGLNVIQGLRLAGADMIIGVDLNNDKKPWGEKFGMTHFVNPKEVGDDIGPYLVNLTKRGADHIGGADYTFDCTGNTNVMRQALEASHRGWGKSVIIGVAGAGQKIATRPFQLVTGRTWMGTALGGARGRTDVPKIVDWYMEGKIAIDPMITHTMPLDDINKGFELMHSGESIRSVVLF

SEQ ID NO: 12121 - protein, 508 aa, Bifidobacterium longum NCC2705
MADTNVNGGTQQATGKLKSVESLDQANEMERGLSNRHVQFIAIGGTIGTGLFLGSGKSISLTGPSIIFVYILVGIIMFFLMRAIGEMMYRDPSQHTFINFITRYLGNGWGHFAGWTYWAALVLLGMTEITAVSTYFITFFDTFGIDLTHWKWLIELCFLVVLVSINLIAVKVFGEVEFWFSMIKITLICAMIATAVVMIVIGYHYPAVQIHGVDHVSPAGHAGFDNLFANFSFAPNGWMAFLMSFQMVFFAYEMIEFVGVTVSETKNPRKVLPKAINEIIVRVLIFYVGALMAIMCIVPWTSFKPNKDGSFASPFIMVFQYAGLNWASALVFFVVITAASSALNSLLYSAGRHLYQLAGESPNPTLNKIGQVSDRKVPARAILVSAVLILLSPIVNAIPGVSGAFVLFSSASSAVFLFIYILTLMAHRKYRRSADFIPDGFVMPAWKVLNTVAIAFFVFIYLTLFLADDTRNSAIAGLVWLVGFGGFSMLRERYRSRDLKVALEHKEI

SEQ ID NO: 12122 - protein, 165 aa, Xanthomonas axonopodis pv. citri str. 306
MVTEAAATTTATAELKPTKGNDVKGTVTFKTVDGALRVTGQLSGLKPNTEHGFHIHEKGDCSAPDGSSAGGHFNPSQSDHGNISADPHHGGDMPNITADAQGNASIDGPVSSNVNLGKADQFDIAGHAVIVHADADDYKTQPTGNAGGRLACGVITTDNAQAPAK

SEQ ID NO: 12123 - protein, 204 aa, Oryza sativa
  unsure (1)..(204): unsure at all Xaa locations
XPCHHDHHHGHGDFQAELSPLGMWLSAMGCSLLVSMASLVCLVLLPVIFFQGKPSKTMVDCLAIFGAGAMLGDSFLHQLPHAFGGGHSHTHDHQNHNHSHEHSHAHSLEDLSIGLSVLFGIVLFFIVEKIVRYVEDNSQKGAHGMGHHHHHHKRHDRSDKVKLNHAEQDHEDKGVNQAEKEPSHDGAIEKTDGVTRADSKSAIX

SEQ ID NO: 12124 - protein, 498 aa, Mycobacterium leprae
MATLAESPEPKSGASRAGVLGEEAGYHKGLKPRQLQMIGIGGAIGTGLFLGAGGRLAKAGPGLFLVYAVCGVFVFLILRALGELVLHRPSSGSFVSYAREFFGEKAAYVVGWLYFLDWAMTAIVDTTAIATYLHRWTIFTALPQWTLALLALAVVLVMNLISVEWFGELEFWAALIKVCALMAFLVVGTIFLGGRYPVDGHNTGLSLWTSHGGLFPTGVAQLIVVSSGVMFAYAAVELVGTAAGETVEPKKIMPRAINSVIARIAIFYVGSVILLALLLPYSAFKASESPFVTFFSKVGFYGAGDLMNIVVLTAALSSLNAGLYATGRVMHSIAINGSGPKFTARMSKNGVPYGGILLAAVICLCGVALNAFNPGQAFEIVLSVAALGIIAGWGTIVLCQLRLHKMAKAGIMRRPRFRMPLAPYSGYLTLAFLFAVLVVMAFDKPIGTWTVASLIVIVPALIAGWYSIRKRVMTIARERMGYTGPFPAIANPPVKSSD

SEQ ID NO: 12125 - protein, 238 aa, Pseudomonas syringae pv. syringae B728a
MSLDWHGAWLSVIHHPLFGIAITLSAYQLAMAAYERTRWLFLQPVLVSMVVVIGIVLFCDLEYTEYRKSTEILGTLLGPATVALAVPLYLNMRRIRQLFWPVLTTLVIGGVFATGLCVGFGVLFGADHMILMTMAPKSVTSPIAMLVAEQIGGVAALAAVFVLITGVFGAIFGPGLLSLIGVDNPAARGMALGLTAHAVGTSVALQEGEETGAFAALAMSLMGVATALFLPLAMSLAI

SEQ ID NO: 12126 - protein, 177 aa, Halobacterium sp. NRC-1
MANLWEDLETGPDAPDVIYAVVECLKGERNKYEYDKDIPGVVLDRVLHSNVHYPSDYGFIPQSYYDDGDPFDVLVLVEDQTFPGCVIEARPVALMEMDDDGEQDDKVIAVPEEDPRYDDVEDVDDLTDQQKAEIAEFFETYKNLEADKETAVLGWGDAQAAKDAIEHAQDLYDEQFA

SEQ ID NO: 12127 - protein, 525 aa, Pseudomonas syringae pv. syringae B728a
MPKSSCTSARIRSTRSRSSVITVPGCLRRAQNTNCRASARLCHTLWRTASLQCSAPHWQSNDELLTCRSDCTTLEPIMSQPWSPDSWRALPIQQQPHYPDAEHLHRVEQTLASYPPLVFAGEARELRRQFAEVTQGRAFLLQGGDCAESFMEFSAAKIRDTFKVLLQMAIVMTFAAGCPVVKVGRMAGQFAKPRSANDEIIDGVTLPAYRGDIVNGIGFDEKSRVPDPERLIQAYNQSTATLNLLRAFAQGGFADLHQVHKWNLDFIANSALADKYSQLAGRIDETLAFMRACGMDGSPQLRETSFFTAHEALLLNYEEAFVRRDSLTNDYYDCSAHMLWIGDRTRQLDGAHVEFLRGVNNPIGVKVGPSMNTDDLIRLIDILNPDNDPGRLNLIARMGANKVGDHLPQLIRAVEREGRKVLWSSDPMHGNTIKASSGYKTRDFAQILGEVKQFFQVHQAEGTYAGGIHIEMTGQNVTECIGGARPITEDGLSDRYHTHCDPRMNADQSLELAFLIAETLKQVRR

SEQ ID NO: 12128 - protein, 169 aa, Leavenworthia stylosa
NTERVGMIHDGESRFSIKGKPIHHFLGTSTFSEYTVVHSGQVAKINPEAPLDKVCIVSCGLSTGLGATLNVAKPKKGQSVAVFGLGAVGLGAAEGARIAGASRIIGVDLNSNRFEQAKKFGVTEFVNPKEHDKPLQQVIAEMTNGGVDRSVKCTGSVQAMIQAFECVHD

SEQ ID NO: 12129 - protein, 110 aa, Zea mays
  unsure (1)..(110): unsure at all Xaa locations
HPSVPNPPTKPLGALFFLIRNXRPGVSEFGWGNAFPELKDAFGSDDPRLQRKALNLIQYLLNNSKATRSVATKLGFPKLMIHLGSSDDSLGREAVLGGLLDLPRTRTFVN

SEQ ID NO: 12130 - protein, 314 aa, Triticum aestivum
MTRRCSHCSHNGHNSRTCPNRGVKIFGVRLTDGSIRKSASMGNLSLLGGSTSGGGGASPADVGHDAAAEGYASDDFVQGSSSANRERKKGVPWTEEEHRRFLLGLQKLGKGDWRGISRNFVVSRTPTQVASHAQKYFIRQANMSRRKRRSSLFDLVPDESDLPPLPGNQEPEAQILNHPPLPPPMEEEEVESMESDTSVIAESSSASAIMPENLQSSYPVLVPAYFSPFLQFSVPFWQNQNDGDDLGQGTHEIVKPVPVHSKSPINVDELVGMSKLSIGDPKQDTVSTSLSLKMVGGQNRQSAFQANLPTRAQA

SEQ ID NO: 12131 - protein, 343 aa, Mesorhizobium loti
MKTVYSPLHAGHAGQMELVTSAIVPGFEKPSRAEFIKARVESENLGPIVLPLEHDLAAAKRIHKSDYVDFLPTVWPQWVASGHEGTAMPFTWPTRGLRGDVPPKRVDALLGYYSFDAGATFVEGTWAAIKSSYDVALTAAGLVKGGERSAFALCRPPGHHAGAGFMGGYCYINNAAVAAQWFLDQGAKRISILDVDYHHGNGTQEIFYDRADVQVLNLHGDPLVEYPFFLGHADERGAGDGEGFNINYPMPFGTDWDAWNASLEDACGKLAAYAPDIVIVSLGVDTFEKDPISQFKLTSPDYPKIGRRIAKLGLPTLFVMEGGYAVEEIGINAVGVLTGFEDR

SEQ ID NO: 12132 - protein, 395 aa, Pseudomonas fluorescens PfO-1
MTAALMNTYQPLDLSFIKGLGTRLWDLSGREYLDAVAGVAVTNVGHSHPRIVSAISEQAGLLLHTSNLYSIDWQQSLARKLTQLAGMERAFFNNSGAEANETALKLARLYGWHKGIEQPLVVVMANAFHGRTLGTLSASDGPAVRLGFNELPGDFVKVPFGDLEALEQVQRKHGQRIVAILVEPIQGESGVQLAPPGYLKALRELCNRHAWLLMLDEIQTGIGRTGRWFAFQHEGIVPDVMTLAKGLGNGVPIGACLARGRAADLFTPGSHGSTFGGNPLACRVGCTVLEIIEEQGVLEHARVQGERLLTRLRAELADNPNVLAIRGQGLMIGIELKQPIRDLTLIAARDHGLLINVTRGKTIRLLPPLTIDEREVGMIVRGVGRSLSHVSSLGQ

SEQ ID NO: 12133 - protein, 470 aa, Pseudomonas putida KT2440
MDATSTTTTAKSGHESKLSASLKSRHLTMMSIAGVIGGALFVGSGSVIHSAGPAAVLAYLAGGILVVLIMRMLGEMATSSPDTGSFSTYADRAIGRWAGFTIGWLYWWYWVILMAWEAYVAGKILHGFFPDVSVNVFVLATTLLLITVNFFNVKHYGEFEFWFALIKVIAIVCFLIVCTAAVMNIWQFGEVRGISHLTAEGFMPNGITTVIGALLGVMFAFLGAEIVTIAASEAKDPAAQIVKATNSVVWRVCLFYVGSIFLIVCLVPWNDPHLGVSGYGAYRRTLELLGVPYAELLMNFVVLTSVSSCLISGHYTASRMLFSLAQRGDAPSFFKITRAGTGVPVYAIMGSCAVAVVCALINFSETLRPKDVLDTLMNTTGMIALLVYLVIAFSQLRMRRKLIAEGKEVRLKMWLFPWLTYLVIAFIVAALVTMAFMPDYQILVISTGIAAAVVVAMGVVHQIRSGSKQH

SEQ ID NO: 12134 - protein, 399 aa, Agrobacterium tumefaciens str. C58 (Cereon)
MAEAAAPLFDTFARAPLRFERGEGVWLFTESGERYLDFAAGVAVNSLGHAHPHLVEAIKTQAEKVWHVSNLYEVPGQEKLAKRLTEATFADKVFFTNSGAEALECAIKTARRYHYSKGHPEKFRIITFEGAFHGRTLATIAAGGQQKYLEGFGPKVEGFDQVPFGDVDALKAAITAETAALLIEPIQGEGGIRAPAKEFLQLLRSLCDEHDLLLIFDEVQTGVGRTGKFFAYEQTGVAPDIMAVAKGIGGGFPLGACLATADAASGMTAGVHGTTYGGNPLAMAVGNAVLDVVLADGFLEKVRDVALVFRQGLASLKDRYPDVIEEIRGEGLLLGIKARVPSGELLQAMRAEHLLGVPAGDNVIRLLPPLVTTAEEAREGLARVEAAAASLTAKQAKIA

SEQ ID NO: 12135 - protein, 267 aa, Triticum aestivum
  unsure (1)..(267): unsure at all Xaa locations
PDEGPAGAAGAHPVRPRLAPSRATCAVQAIAPRDAEAMRTAEESVQGVQVPQASGGGFSAGGGXMETAAAYNQAVGAVRPGQASEAATKQGITVTQTAVPGGRIVTEFVAGQVVGQYSVADQAMMQQQQQQVKEDASKVTIGEAMKAAALSAGDRPLEEADVAAIRAAETQAQGADTVMPGGLADQAWAAASANAWAERDEDKITVGDVLSDATTKLADDKPAATEDAARVVQAETYSDAGARTKAGGVGAAVTTAARLNQEDDDDA

SEQ ID NO: 12136 - protein, 347 aa, Zea mays
MSTSTLKEPNVSQSKDVENGKDNSVKSCISKPVLNGNKCANKEQNVLSCCPGAVTNGNEAGNADVEYIDSENLVDLPDVDAALCTLVKRLDSKDWVMTCEALNNVRQLAMYHKERLQELLEPLVPLIVKSVKNPRSAVCKTALMTCADIFKVYGDLLVESIDPLLVQLFLKASQDKRFVCEAAEAALTSMTSWISPLLLLPRMQPYLKNRNPRVRAKASVCLSKSVPCLDMQGVREYGMDKLVQIAATQLSDQLPESREAARNLALELQVLYEKSQASTSDENEGEPSVSQDAESWEAFCQSKLSALSAQAILRVTSTTPKEGVASTSNATKEGVTAAPKEGLDVDC

SEQ ID NO: 12137 - protein, 465 aa, Heuchera canadensis
SGKPFYAIVHRVTGSLIIDFEPVKPYEVPMTAAGALQSYKLAAKAITRLQALPSGSVERLCDTMVQEVFELTGYDRVMAYKFHDDDHGEVVSEITKPGLEPYLGLHYPATDIPQAARFLFMKNKIRMICDCRAKHVKVLQDEKLPFDLTLCGSTLRAPHSCHLQYMENMNSIASLVMAVVVNDGDDESESSNPAQPSKRKRLWGLVVCHNTTPRFVPFPLRYACEFLAQVFAIHVSKELELENQILEKNILRTQTLLCDMLMRDAPLGIVSQSPNIMDLVKCDGAALLYKDKIWRLGVVPTDSQLQDIASWLSKYHMDSTGLSTDSLYDAGFSRALSLGDVVCGMAAVKINSNDILFWFRSHTAAEIRWGGAKHETGEKDDNRKMHPRSSFKAFLEVVKTRSLPWKDYEMDAIHSLQLILRNTFKDIETVDANTNKIHTKLSDLKIEGMQELEAVTSEMVRLIET

SEQ ID NO: 12138 - protein, 338 aa, Glycine max
  unsure (1)..(338): unsure at all Xaa locations
DVHTRIMKRNYEQVPEWWFVSILLLMIVVSLITCEGFGKQLQLPWWGVLMSLVIALVFTLPIGVIQATTNTQVGLNVITELIIGYIYPGRPLANVAFKTYGYISMSQALGFLQDFKLGHYMKIPPKSMFVVQLVGTIVASGVYFGTAWWLLTSIPHICDETSLPAGRPWTCPSHQPDPSTTLLGEWWESCSISTFTISSRHGGLDTITSFQALVILVLLARKSFSILPFNTXHIRFNIAGGGGIPPARSVNYITWGFVGIFFNFYVYSKFKAWWARHTYILSAALDAGVAFMGVILYFALQNYGVFGPIWWGQDADDHCPLAKCPTAPGVIAHGCPLL

SEQ ID NO: 12139 - protein, 216 aa, Gossypium schwendimanii
DIYYWECKGYTPLFPRILGHEASGIVESVGEGVNDLKPGDHVLPIFTGECKECRHCLSEESNNMCELLRINCDRGVMLADGKTRFSINGKPIYHFVGTSTFSQYTVVHVGQVAKISPTAPLDKVCPISCGICTGFGATVNVAKPKKGQTVAVFGLGAVGLAAAEGARVCGASRIIAVDVNPRRFEEAKRFGITEFVNPKDYDKPVQEVIVEMTGGG

SEQ ID NO: 12140 - protein, 387 aa, Vernicia fordii
MKQQQYKDTPILNGVNGFHAKEEEEEEDFDLSNPPPFNIGQIRAAIPKHCWVKNPWRSLTYVFRDVVVVFALAAAAFYFNSWLFWPLYWFAQGTMFWAIFVLGHDCGHGSFSNNSSLNNVVGHLLHSSILVPYHGWRISHRTHHQNHGNVEKDESWVPLPEKIYKEMDLSTRILRYSVPLPMFALPFYLWWRSPGKEGSHFNPNSDFFAPHERKAVLTSNFCFSIMALLLLYSCFVFGPVQVLKFYGIPYLVFVMWLDFVTYMHHHGHEEKLPWYRGKEWSYLRGGLQTVDRDYGWINNIHHDIGTHVIHHLFPQIPHYHLIEATKAAKPVLGKYYREPKKSGPFPFHLFSNLVRSMSEDHYVSDIGDIVFYQTDPDIYKVDKSKLN

SEQ ID NO: 12141 - protein, 533 aa, Oryza sativa
  unsure (1)..(533): unsure at all Xaa locations
GLGGGCLRDGRSGGGVGGGGGGRVDSATSAGARDGFAELERQQQLLATCTRLYQQLTEHFGSLERRLAARSETLRTKRRFLDVRTSRRLEALRRREASIDGSVSLALSRLDSLAKGDAGTTGSASADAAGIAEGLRSLCASMDSAGFFTFVVARRKEVDALRAELPDALKRCVDPARFAMDAVSEVFPIDKRAGEVPHXDLAWACVLILEAVVPSLADPESGAARPMVPQAARERARGMAREWKDAAEKKGGVEGAKPPDAHAFLQHVATFAVAEKEDKELYRRIVVSFSWRRQMPRLAITLGLGDEMDDIIEELITKGQQLDAVNFAYEAGLQEKFPPAPLLKAYLEDSKKIPSNSDNLSTSTGQSGSNANKKEQSALRAVIKCVEDHKLEAEFPLEDLRERLEELEKAKTEKKKAASSSSSGGSSGPANKRIRASTGGPMPPAKAGRLTDXTPVHRLRLPPPRPMPHSFAPRPMPPTPMHTTTHLRYPASASAXSYPSPPMTYPAYAGYSNGXXATAMQWPXAFHHQAYYR

SEQ ID NO: 12142 - protein, 252 aa, Chloroflexus aurantiacus
MGDKVALITGAASGIGLACAERFAADGYRVVLVDLPGAAGEAAAERLGGIFAGVDLATQAGCRQAVDAALNAYGRVDVLINNAGFQHIDAIEDFPEERWETMIAVMLTAPFRLTKYVWPGMKANRWGRIVNIGSVHSLRASPFKSAYISAKHGLLGLTRTAALEGGPYGITVNLIAPAYVRTPLVEKQIADQSRTRGIPEDQVIEKIMLEPAAIKRLIEPAEVAGLAAFLCSDAAGAITGSVYEMALGWTAR

SEQ ID NO: 12143 - protein, 565 aa, Triticum aestivum
  unsure (1)..(565): unsure at all Xaa locations
DLDVPASPVRRGRVTHPGLPYAAVLLRRAVRQRRRGVRNLGVGPLVRRTSARDQRVIGKDNIVEAPNENLPDAGVAAIDGAEDVSEVLDRRMWRDRMRLERLKDLQHSGGKEQVAPAGAHRHGSAPREAAAPAPRMRVSRAQDGILEYARRMRQVCRPLAVVRAISPERRRPLSGASGCLRAWXATLGSLLSALMPAKVPAREGISAVIKHMSPDIEKIRRLVRQSKCLQDKMTAKEISTWLAVVKQEEELFMRLHPGARPPASAGGIASAISFNASSSEYDVDVADDCKGDEAGTHKMAMADPTAFNLGAAILNDKFLMQAPMKEETADMEYVQKRSAVAAEPELMLNNRVYTCNNVQCPHSDYGYGFLDRNARTNHQYTCKYNDPLPPSAENKAAPPAPPQVFPAAYNQPNHGLNNLDFGLPMDGQRSIAELMNMYDTAFPATNKNMGNDDVTIIERPNAITPVTQMDEGFFGQGNGIGGNGDSMFSDVSNMMQQQQAQQPQQQQQQQQQAPAQQQFFIRDDAQFGNQMGSISGASDFRFGSGFNMSGTVDYPQKNDGPNWYY

SEQ ID NO: 12144 - protein, 335 aa, Nitrosomonas europaea ATCC 19718
MNVLVTGGAGYIGSHTCVELLTAGYEVVIFDNFCNSHPEALRRIEQITSKKITIVTGDIRNQVAIEKALKDYGCEAVIHFAGLKAVGESVEKPLEYYDNNVIGTHRLLAAMQNCGVYTLVFSSSATVYGEPQRLPLTEDHPLSATNPYGRSKLIIEEMLRDVYRADPRFRIAILRYFNPVGAHDSGLIGEDPQGIPNNLMPFVAQVAVGRREYLNVWGSDYPTHDGTGVRDYIHVVDLALGHLGALDYLTVPQCMAINLGTGIGYSVLDVIKAFEEASSRQIDYRLASRRSGDVAACYANPALAEKLLRWKAQRDLAVMCRDHWRWQKNNPAGYV

SEQ ID NO: 12145 - protein, 236 aa, Triticum aestivum
MAKRPGGGPKSEGASQESGANAAPELSTAEKQELQNKMAKLMAMLDEVDRKYKHYYHQMQNVVASFDMVAGPGSAKPYTAVALQTISRHFRCLKDAINDQINVIRKKLGEEENSSSKEGKLTRLRYIDQQLRQQRAFQQYGMIPQNAWRPQRGLPENSVTVLRAWLFEHFLHPYPKDSEKLMLARQTGLTRSQISNWVINARVGEWRPRPGDSKKDGRGGREPETTASGAEEGRFR

SEQ ID NO: 12146 - protein, 581 aa, Zea mays subsp. mays
MKREYQDAGGSGGDMGSSKDKMMAAAAVAGEQEEEDVDELLAALGYKVRSSDMADVAQKLEQLEMAMGMGGVGGAGATADDGFVSHLATDTVHYNPSDLSSWVESMLSELNAPPAPLPPATPAPRLASTSSTVTSGAAAGAGYFDLPPAVDSSSSTYALKPIPSPVAAPSADPSTDSAREPKRMRTGGGSTSSSSSSSSSMDGGRTRSSVVEAAPPATQASAAANGPAVPVVVVDTQEAGIRLVHALLACAEAVQQENFSAAEALVKQIPMLASSQGGAMRKVAAYFGEALARRVYRFRPPPDSSLLDAAFADLLHAHFYESCPYLKFAHFTANQAILEAFAGCRRVHVVDFGIKQGMQWPALLQALALRPGGPPSFRLTGVGPPQPDETDALQQVGWKLAQFAHTIRVDFQYRGLVAATLADLEPFMLQPEGDDTDDEPEVIAVNSVFELHRLLAQPGALEKVLGTVRAVRPRIVTVVEQEASHNSGTFLDRFTESLHYYSTMFDSLEGAGAGSGQSTDASPAAAGGTDQVMSEVYLGRQICNVVACEGAERTERHETLGQWRSRLGGSGFAPVHLGSNA

SEQ ID NO: 12147 - protein, 131 aa, Castanea sativa
MANSLCFTSVCSFKSPNKPGIVIGKSVTRKVLRVNELFQKSETAKFQSLEVKATESNKGTKPNSIVCADCDGNGAKLCTQCEGSGVNTVDHFNGQFKAGGLCWLCRGKREILCGSCNGAGFLGGFMSTFDE

SEQ ID NO: 12148 - protein, 406 aa, Glycine max; identical to SEQ ID NO: 11832

SEQ ID NO: 12149 - protein, 290 aa, Solanum tuberosum
LNSSYRVPFESFRVPFVDLQEATNNFDEKFHIGLGGFGKVYRGVLRDGTKVALKRCKRESSQGIEEFRTEIEILSFCSHPHLVSLIGYCDETNVMILVYDYIENGNLRSHLYGPDLPTMSWEQGLEICIGAARGLHYLHTSAVIHRDVKSINILLDENFVAKITDFGISKKGTELDQTHLSTLVQGTIGYLDPEYFLRGQLTEKSDVYSFGVVLFEVLFARPAIVQSLPREMVSLAEWAVDSHNKGQLEQIVDPDLAAKIRPESLRKFGETAVKCLALSSEDRPSMGDVL

SEQ ID NO: 12150 - protein, 199 aa, Leavenworthia crassa
SVGEGVTDLQPGDHVLPIFTGECGECPHCHSEESNMCELLRINTERGGMILDGESRFSINGKPIHHFLGTSTFSEYTVVHSGQVAKINPKAPLDKVCIVSCGLTTGLGATLNVAKPKKGQSVAVFGLGAVGLGAAEGARIAGASRIIGVDLNSNRFEEAKKFGVTEFVNPKEHNKPVQQVIAEMTNGGVDRSVECTGSV

SEQ ID NO: 12151 - protein, 454 aa, Escherichia coli O157:H7 EDL933
MTMSHNVTPNTSRVELRKTLTLVPVVMMGLAYMQPMTLFDTFGIVSGLTDGHVPTAYAFALIAILFTALSYGKLVRRYPSAGSAYTYAQKSISPTVGFMVGWSSLLDYLFAPMINILLAKIYFEALVPSIPSWMFVVALVAFMTAFNLRSLKSVANFNTVIVVLQVVLIAVILGMVVYGVFEGEGAGTLASTRPFWSGDAHVIPMITGATILCFSFTGFDGISNLSEETKDAERVIPRAIFLTALIGGMIFIFATYFLQLYFPDISRFKDPDASQPEIMLYVAGKAFQVGALIFSTITVLASGMAAHAGVARLMYVMGRDGVFPKSFFGYVHPKWRTPAMNIILVGAIALLAINFDLVMATALINFGALVAFTFVNLSVISQFWIREKRNKTLKDHFQYLFLPMCGALTVGALWVNLEESSMVLGLIWAAIGLIYLACVTKSFRNPVPQYEDVA

SEQ ID NO: 12152 - protein, 128 aa, Zea mays
  unsure (1)..(128): unsure at all Xaa locations
TLEACRDELWHPNCNTNNIYITAGHDSIISYCKVSKQRADCVDSEAGEVLSMGSXNMSDIFTGKCVAKISPADPTLTIAPRRRGDDSRSTIRSTVPEALEDITALFYDEDRNEIYTGNSKGLVHVWSN

SEQ ID NO: 12153 - protein, 319 aa, Lycopersicon pimpinellifolium
MGSKYSKATNSISDASNSRYGVPFENYRVPLVDLEEATNNFDDNFFIAEGGFGKVYRGVLRDGTKVALKRHNCDSQQSIEEFRTEIEILSRRSHPHLVSLIGYCDGRNEMILIYDYMENGNLKSHLYGSDLPSMSWEQRLEICIGAARGLHYLHTNGVMHRDVKSSNILLDENFVPKITDFGLSKTRPQLYQTHVSTDVKGTFGYIDPEYFIKGRLTEKSDVYSFGVVLFEVLCARSAIVQSLPSEMVNLAEWAVESHNNGQLEQIIDPNLAAKIRPESLRKFGETAVKCLALSSEDRPSMGDVLWKLEYALRLQESVI

SEQ ID NO: 12154 - protein, 1039 aa, Sorghum bicolor
FRLLAFSENAADLLDLSPHHSVPSLDSAAPPPVSLGADARLLFSPSSAVLLERAFAAREISLLNPLWIHSRVSSKPFYAILHRIDVGVVIDLEPARTEDPALSIAGAVQSQKLAVRAISRLQALPGGDIKLLCDTVVEHVRELTGYDRVMVYRFHEDEHGEVVAESRRDNLEPYLGLHYPATDIPQASRFLFRQNRVRMIADCHATPVRVIQDPGMSQPLCLVGSTLRAPHGCHAQYMANMGSIASLVMAVIISSGGDDEQTGRGGISSAMKLWGLVVCHHTSPRCIPFPLRYACEFLMQAFGLQLNMELQLAHQLSEKHILRTQTLLCDMLLRDSPTGIVTQSPSIMDLVKCDGAALYYHGKYYPLGVTPTESQIKDIIEWLTVCHGDSTGLSTDSLADAGYLGAAALGDAVCGMAVAYITPSDYLFWFRSHTAKEIKWGGAKHHPEDKDDGQRMHPRSSFKAFLEVVKSRSLPWENAEMDAIHSLQLILRDSFRDAAEGTSNSKAIVNGQVQLGELELRGINELSSVAREMVRLIETATVPIFAVDTDGCINGWNAKIAELTGLSVEEAMGKSLVNDLIFKESEEIVEKLLSRALRGEEDKNVEIKLKTFGSEQSNGAIFVIVNACSSRDYTQNIVGVCFVGQDVTGQKVVMDKFINIQGDYKAIVHNPNPLIPPIFASDENTSCSEWNTAMEKLTGWSRGEVVGKFLIGEVFGSFCRLKGPDALTKFMVVIHNAIGGQDYEKFPFSFFDKNGKYVQALLTANTRSKMDGKSIGAFCFLQIASAEIQQAFEIQRQQEKKCYARMKELAYICQEIKNPLSGIRFTNSLLQMTDLNDDQRQFLETCSACEEQMSKIVKDATLQSIEDGSLVLEKSEFSFGDVMNAVVSQAMLLLRERDLQLIRDIPDEIKDASAYGDQFRIQQVLADFLLSMVRSAPSENGWVEIQVRPNVKQNSDGTDTELFIFRFTYPGEGLPADIVQDMFSNSQWSTQEGVGLSTCRKILKLMGGEVQYIRESERSFFLIVLELPQPRPAADREIS

SEQ ID NO: 12155 - protein, 214 aa, Paeonia lactiflora
IVESVGEGVTDLKPGDHVLPVFTGECKECRHCKSEESNMCDLLRINTDRGVMLNDGKSRFSINGQPIFHFVGTSTFSEYTVVHVGCVAKINPEAPLDKVCVLSCGISTGLGATLNVAKPKKGSSVAIFGLGAVGLAAAEGARIAGASRIIGVDLNPKRFEEAKKFGVTEFVNPKDYNKPVQEVIAEMTDGGVDRSVECTGSIMAMISAFECVHD

SEQ ID NO: 12156 - protein, 143 aa, Triticum aestivum
  unsure (1)..(143): unsure at all Xaa locations
FLEIKAKWFPFFXLMFLIIMAFIVPDSINFLPTLVSFMYVSWLYLRYFQRNPLTGLKGDPSDDFSFPSLFPAAMRPVTDPVANLFDRMLCARSRPSEVALPISDPAKASRRRERGERVLEERLAADNAGDTEATPHGHGTAED

SEQ ID NO: 12157 - protein, 365 aa, Daucus carota
MLELRLVQGGLLKKVLESIKDLVNDANFDCSASGFSLQAMDSSHVALVAVLLRSEGFEHYRCDRNISMGMNLGNMAKMLRCAGNDDIVTMKADDDGDVITFMFESPTQDKISDFEMKLMDIDSEHLGIPESEYEAIVRMPSAEFARICKDLSTIGDTVVISVTKEGVKFSTRGDIGTANIVCRQNTSVDKPEDATIIEMQETVSLTFALRYMNSFTKATPLANQVTISLSSELPVVVEYKIAEMGYIRYYLAPKIEEEDEAANYAQPAQNSAAAATSNNGTKKNEGNNKVDSKKRAIKSEFVDDSEAATDAQPQAKAKTKTEAGEDDDVEVMDTKPKNEPDDGDEVMETKPKTESNGEVEVMDIE

SEQ ID NO: 12158 - protein, 510 aa, Lolium rigidum
MDELFLLSVLLAAAAVALLQVLKVALNPVSDRAPPGPWKLPVIGSMHHLVNVLPHRALKDLADVHGPLMMLQMGQTPLVVASSKETARLVLKTHDTNFATRPKLLAGEIVGYEWSDIVFSPSGDYWRKLRQLCVAEILSPKRVLSFCHIREEEVGIRVEQIRAAGPSTPVNLSVMFHSITNSIVARATFGKKRKNAAEFMAAIKSGVGLASGFNIPDLFPTLTTVLATITGMKRSLHGIHTSHTTVDTILEEIINERNIARAEKIKAGATENVDENLTDVLIGLQGKGGFGFHLDNSKIKAIILDMFAGGTGTSASAMEWGMSELMRNPAVMEKLQGQIREAFKGKTVVTEANLQASGLRYLKLVIKEALRLHPPAPLLVPRESIDVCELEGYTIPAKSRVVINAWAIGRDPRYWDDAEEFQPERFEDGTVDFTGSNYEFLPFGAGRRMCPGFNYGLASMELALVTLLYHFDWSLPEGVAEVDMEEAPGLGVRRRTPLMLLATPFVPVVA

SEQ ID NO: 12159 - protein, 381 aa, Medicago sativa
MSCSVAVSNSPVFSPSSSLFCNKSETLTLSLSHLKPSSTTTTTTTSSSSSSSSPSPCSSPSSPFCLRLPKLPLVFTSNKDSGSQNDAVLKRKRPTRLNIPVSEHAFCVPATPSAVARDVVEAEGDGYSVYCKRGRREYMEDRYTAGVNLRGENNLAFFGVFDGHGGAKAAEFARNNLEKNILDEVIMTDEDDVEEAVKRGYLNTDSEFMKKDLHGGSCCVTAFIRNGNLVVSNAGDCRAVISRGGVAEALTSDHRPSREDEKDRIETLGGYVDLCRGVWRIQGSLAVSRGIGDRHLKQWVTAEPETKVIRIEPEHDLLILASDGLWDKVSNQEAVDIARQFCVGNNNQQPLMACKKLAQLSVSRGSLDDTSVMIIKFKHYV

SEQ ID NO: 12160 - protein, 1778 aa, Listeria monocytogenes EGD-e
MKKKFSIVIISVLLLGYLAPFDTLLVGADETTVSEDTAVKTAEADSATEGIESETGSDDETAEEPKEAKEAEASKETTEKEEKAKTEEPASNIKTEINTDKSQLKQTSLKAAVPAGSTYNSLFPDDNLAKKLAVIITGNAAATGNESVDSAALLAISQLDLSGETGNDPTDISNIEGLQYLENLTSLNLSENNISDLAPLKDLVNLVSLNLSSNRTLVNLSGVEDLVNLQELNVSANKALEDISQVASLPVLKEISAQGCNIKTLELKNPAGAVLPELETFYLQENDLTNLTSLAKLPKLKNLYIKGNASLKSLETLNGATKLQLIDASNCTDLETLGDISGLSELEMIQLSGCSKLKEITSLKNLPNLVNITADSCAIEDLGTLNNLPKLQTLVLSDNENLTNITAITDLPQLKTLTLDGCGITSIGTLDNLPKLEKLDLKENQITSISEITDLPRLSYLDVSVNNLTTIGDLKKLPLLEWLNVSSNRLSDVSTLTNFPSLNYINISNNVIRTVGKMTELPSLKEFYAQNNSISDISMIHDMPNLRKVDASNNLITNIGTFDNLPKLQSLDVHSNRITSTSVIHDLPSLETFNAQTNLITNIGTMDNLPDLTYVNLSFNRIPSLAPIGDLPNLETLIVSDNNSYLRSLGTMDGVPKLRILDLQNNYLNYTGTEGNLSSLSDLTNLTELNLRNNVYIDDISGLSTLSRLIYLNLDSNKIEDISALSNLTNLQELTLENNKIENISALSDLENLNKLVVSKNKIIDISPVANMVNRGAIVTASNQTYTLPTVLSYQSSFTIDNPVIWYDGTLLAPSSIGNSGNYKDGKITWTNMTATSSSTLFNFNRLKDGLTFSGTVTQPYKSAAKVTADAEQTYTIGDTISEEQFLKDVNAKSSDGAPVTSDFATVVDLNTFGEYEVTLTSEKDGIQGDSCKVIVKVLHGAPVISADQTISYDKHATITEKQFLEDIHASTDLDTAITTNFSTAVNLNKGGDYTVALNSENEDGVKAETVYVTVTVNKDPAPIISAKTEITYDKFSKKTEAAFLDDIDADTNDGSIVTSNFATAVNLDKAGDYTVTLNSINSDGVAGTPTAIIVHVEKEKIATISTNTAQQYEKYAKINETQFLKDVHASINASPTTAVLESDFETVVKLDVPGTYTVTITATNEDGGVSAPKEVSVIVRKIPAPEITADKEITYPKFDEVSEAEFLNDIHATISDKNVAITSNFSTDVNLNKAGDYTVTLNATNEDGVKATPVEVIVHVQQGERPVITADATISYDKFANITEAKFLEDIHATSSDGQSSTVITSNFQTATNFKTAMSYTVTLNAVNEDGISAEPVAVTVTINKEPAAALKADAEVSYAKNEAVTESDFFKDVHLEGTEAPSTAKATSNFDSVVDRSKTGDYTVTINATNEDGAVSTPIEVIVHIEAESAPVITANAEVKYNKHEQTDERRFLYDSEAKIDEANVEIKTDFAEKVDINKVGTYTVTLTATNEDGQAANPVEVSVIVSDAAAEKVNVKYVDENGSEISAAETLTGNLDETFSIDAKSIAGYKCDATLSGVFSTVEQTVVFHYKAIKPGVVTIKYEDTNGKAVDEDKQITGEVGDDFEAEAQTVSGYSCRAIASGKITEEPQTITFTYSTATPSKKSGEITVQYVDESGKKLADSKKVTGNIDDSYSVEAKAIEGYSVVGDDSAKGVFTEKSQTVTFKYKKNTQVSKDDPKVKGKTNQPSSTDTKLKVDNNSLPATGDTENMILAVLIGFNMLIVASIFLFRKPKTNQ

SEQ ID NO: 12161 - protein, 807 aa, Cytophaga hutchinsonii
MHIIQPLYMKIILSVSIFLISVFSAFSQDCWKMVAKGSDHTIAVRQDGTLWSWGQNMYGQLGDGSGYSSIIPVQVGTLTTWDKVFAKYDNSFAIMKDGTLWAWGMNSLGTLGDGTEQVRKTPVKVGTATDWQSVETNFNFTAAIKKDGSLWIWGDNYNGQLGNGTKVKNIIPSKVGSGKNWKSVSIGSSNILAIKTDGTLWGWGNNYYNQIGYTPTVDVLSPTQIGSETDWKSVSCGDDHVMAIRTNGSLWIWGSNKEGQIGNGEINSYQTEPVQVGSDTDWGTCHAIQDWSIAIKTNGSLWTWGSGYGYYNSSYIRKNIPTQFGRDTDWSMIYPSEQQSVAFKTDGSLWTWGSNARGQLGLGLYGNTNIPYMVSCPEVLTSSCWQAASIVQSTSFGLRTDSTLWKWGWGNENSLDIYARNDPGFARIGTYKWRAYASGGALLAIKDDGTLWQSGGRNVPVLLSSSKDWKAVAASSSRGYAIKTDGSLWGWDIDNYTNNTEPSGGVIPLLKEINPGTQWQSISASTTTAAAIRDDGSLWIWGSALYGAMGTGIAVAGSPTLIQMGNDTGWQFVSVGESTTMAIKTDGTLWACGQNNYGQLGNGNTTDIYTLTQIGTATDWKTVVAGPYHTLAIKTDGSINGWGSYTYNKLGLGYDLYGNLLEQNWKHIATGPYNSFAIHGDGTLYTVGDNEYTQLGSQNYRSNGPVKIECIIAEDTDPVITSTNDKTTQATEQKYMVYPNPNNGSFTISGSKNSDVYIYNIEGHLEKFTTMSDLKEQIQIDLIQGIYYIIVVDEAGNSSRQTFIVHQ

SEQ ID NO: 12162 - protein, 242 aa, Methylobacterium extorquens
MAQERVALVTGGTRGIGAAISKRLKDKGYKVAANYGGNDEAANAFKAETGIPVFKFDVGDLASCEAGIKAIEAELGPIDILVNNAGITRDGAFHKMTFEKWQAVIRTNLDSMFTCTRPLIEGMRSRNFGRIIIISSINGQKGQAGQTNYSAAKAGVIGFAKALAQESASKGVTVNVVAPGYIATEMVMAVPEDIRNKIISTIPTGRLGEADEIAHAVEYLASDEAGFVNGSTLTINGGQHFV

SEQ ID NO: 12163 - protein, 350 aa, Caulobacter crescentus CB15
MATLLLLPGDGIGPEVCAQVRRVAAALTPDLKVDEALYGGASYDTHGTPLTDEVREQALASDAVLMGAVGGPKWADAPRHLRPEAGLLNLRKAMDVFANLRPAYCFEALAGASSLKPELVSGLDIMFVRELVGGVYFGQPRGIEDLADGQKKGFDTQVYTTSEIERVGRVAFELARGRTNKVHSAEKSNVMESGLLWKQVITELHAREYPDVQLEHILADNCAMQLVRAPKQFDVIVTDNLFGDILSDAAAMLTGSLGMLPSAALGAPGKPGLYEPIHGSAPDIAGKGLANPLAAILSFEMALRWSLKQTEAADALLAAVKAALDNGARTRDLGGSLTTTQMGDAVLAAL

SEQ ID NO: 12164 - protein, 267 aa, Zea mays
MVPCHGAATANPQQFGVIAANRYGSPVKPSLCPSVAFLRLQGSAFRLGNKSLALRAGADSHRYATSSAFAKYNPVKNIKPLLSSPKLKPRTKVGCQASLSSFSYPELSSKPKWWWRTLACVPYLLPLHNMWGHADAIYQLHPYLQRFSLPYAFIDTMALLPGWLFLAIFMTIYFFVVRRKWSPHFLRFHIILAILLDTGSQALATACNWNPSIAFQGKQMAHFWMAMAFIQIFTVAECVRCALSGVYANVPFICHAALIHSDLNLFR

SEQ ID NO: 12165 - protein, 741 aa, Listeria monocytogenes
MKTVLGKTNVTDTVSQTDLDQVTTLQADRLGIKSIDGLEYLNNLTQINFGFNQLTDITPLKDLTKLVDIVMNNNQITDISPLANLTNLTGLTLFNNQITDIDPLKNLTNLNRLELSSNTISDISALSGLTNLQQLSFGNQVTDLKPLANLTTLERLDISSNKVSDISVLAKLTNLESLIATNNQISDITPLGILTNLDELSLNGNQLKDIGTLASLTNLTDLDLANNQISNLAPLSGLTKLTELKLGANQISNISPLAGLTALTNLELNENQLEDISPISNLKNLTYLTLYFNNISDISPVSSLTKLQRLFFYNNKVSDVSSLANLTNINWLSAGHNQISDLTPLANLTRITQLGLNDQAWTNPPVNYKTNVSIPNTVKNVTGALIAPATISDGGSYAEPDITWNLPSYTNEVSYTFNQSVTIGKGTTTFNGTVTQPLKAIFNAKFHVDGKETTKEVEAGNLLTEPAKPVKEGYTFIGWFDAQTGGTKWNFSTDKMPTNDIDLYAQFSINSYTATFDNDGVTTSQTVDYQGLLQEPTAPTKEGYTFKGWYDAKTGGDKWDFATSKMPAKNITLYAQYSANSYTATFDVDGKTTTQAVDYQGLLKEPKTPTKAGYTFKGWYDEKTDGKKWDFATDKMPANDITLYAQFTKNPVAPPTTGGNTPPTTNNGGNTTPPSTNIPGSNTSTGNSASTTSTMNAYDPYNSKEASLPTTGDSDNTLYLLIGLLAVGTAIALTKKARASK

SEQ ID NO: 12166 - protein, 219 aa, Triticum aestivum
  unsure (1)..(219): unsure at all Xaa locations
ITFGRGQPLPRWSTLFLSSPLSDFGGAAISISAQNRRRSWQPRRARMQVAAAADSKNILIMGGTRFIGLFLSRKLVQEGHQVTLFTRGKAPITQQLPGESDAEYAXFSSKVLHLKGDRKDFDFVKTSLSAKGFNVVYDINGXREAPEVSPILEALPNLEQFIYCSSEGVTLNKPAPHFETXXDPKSRHKGKLEQRPDSGVMDHRPATLRPFNTTEEFTG

SEQ ID NO: 12167 - protein, 386 aa, Medicago sativa
MAIHHHHHNHQQLQQHTSSLFDALYCDEEEKWEDDDEGEVVDEGAQSDVTTTNYDILDSTSLLPLLLLEQNLFNEDEELNTLFSKEITQQETYYEDLKNVINFDSLSQPRREAVEWMLKVNAHYGFSALTATLAVNYLDRFLLSFHFQKEKPWMIQLVAVTCISLAAKVEETQVPLLLDLQVQDTKYVFEAKTIQRMELLILSTLKWKMHPVTTHSFLDHIIRRLGLKTNLHWEFLRRCENLLLSVLLDSRFVGCVPSVLATATMLHVIDQIEQSDDNGVDYKNQLLNVLKISKEKVDECYNAILHLTNANNYGHKRKYEEIPGSPSGVIDAVFSSDGSNDSWTVGASSYSTSEPVFKKTKNQGQNMNLSPINRVIVGILATATSP

SEQ ID NO: 12168 - protein, 236 aa, Rhizobium tropici
MQEKSMVKITAAVAVKPKAPLEFRELELADPEGNEILVRTVATGICHTDLLLRDGIFGPPAPVIPGHEGVGIVEAIGADVQGLRVGDHVALSQSSCGFCGDCRRSHPMNCQNYTQYNLTGLRPNGKKALLCDEVGIGSNFVGQSSFATHILATENNAAQLPKDFDLTNAAPLGCGMATGAGTVINAMKPEIGQTIAVFGAGAVGMAAVMAAKVRRCSKIIIIDLNEQRLAMAKTVW

SEQ ID NO: 12169 - protein, 214 aa, Paeonia suffruticosa subsp. spontanea
IVESVGEGVTDLKPGDQVLPVFTGECKECRHCKSEESNLCDLLRINTDRGVMLSDGKSRFSINGQPIFHFIGTSTFSEYTVVHVGCVAKINPEAPLDKVCVLSCGISTGLGATLNVAKPKKGSSVAIFGLGAVGLAAAEGARIAGASRIIGVDLNPKRFEEAKKFGVTEFVNPKDYDKPAQEVIAEMTDGGVDRSVECTGSIMAMVSAFECVHD

SEQ ID NO: 12170 - protein, 327 aa, Zea mays
  unsure (1)..(327): unsure at all Xaa locations
MMESQPLQAPTATAPPPGSAEPAGAPPAVTPGKEFTRTCKGARGVVLIGGYVLLQLLPSSLNYLAIIPSKTIPYVWTVFTAGYIEQVLPGAXIGSSLGLLFCGKDXIEPAWGXRKEFLKFIILINSICGXLAFCFAIGLYYATXGKESFLVTPLXSGFHGXLAGFLVALKQLLPNLELPMCFXWKIKAKWMPFFVVCFSSIMAFIVPDSINFLPTLVSGMYVSWLXLRYFQRNPLTGXLRGDPSDDFSFPSLFPAAMRPVTDPVANLFDRLLCARXSRTLEVALPISDPTKASRRRERGERVLEERLAADNAGDTEASPRGHGTAED

SEQ ID NO: 12171 - protein, 453 aa, Bacillus halodurans
MPTNTMPTGPKGNPVLGNTIEFGKDPLQFITRCSQEYGEIVRLRFERERDTFLLNDPKHIQYVFMNKGGEFSKGYQQDPIMGLVFGNGLLTSEGSFWLRQRRLSQPAFHPKRIADYADTMVGYCERMLNTWMDNDTRDINDEMMQLTMAIATKTLFDLDLHKGDTQEASRSLDTVMTAFNEQMTNVFRHVLHLIGLGKLVPPVSRELREAVESLDKMIYSIIEERRKHPGDRGDLLSMLISTYDEDDGSYMTDRQLRDEIITLFLAGHETTANTLSWAFYLLSQHPHVEEKLYQEVSQVLGNRPATLEDMPKLSYAEHVIKETLRVQPTVWLISRRAEKDVTLGDYHISAGSEIMISQWGMHRNPRYFNDPLTFLPERWDNNDNKPSKYVYFPFGGGPRVCIGERFALMEATLIMATIVREFRMELVDELPIKMEPSITLRPKHGVTMKLRKR

SEQ ID NO: 12172 - protein, 109 aa, Nostoc punctiforme
MSIYVGNLSYEVTQDALSTVFAEYGSVKRVQLPTDRETGRLRGFAFVEMSSEDEETKAIESLDGAEWMGRDLKVNKAKPREDRGGGGSFGGNRGGGGGGYNRGGGGGRY

SEQ ID NO: 12173 - protein, 401 aa, Myxococcus xanthus
MTALSQSEPSLSASSDSSTDALVQKAKRHLLQNYKQPPFVLARGQGARVWDMDGREYLDLIGGIATCALGHCHPEVVAAAKAQLDSLWHVSNVFYSQPQIDLAAQLTEWSGLSRAFFCNSGAEANEALLKLTRKVMKDRGTPERFEVISFDSSFHGRTLATVTATGQAKYQKGFEPLPAGFTHVPYGDLEAVRKAVGPATAAILVEPIQGEGGVRMAPLGFLVGLRALCDEHGLLLLVDEVQTGMGRTGKPFGFMHEGIVPDGISVAKALGNGLPIGAMLCKEELGASLTPGTHGSTFGGNPVAAAAANAVVRILRRPGFLDEVQEKGAYLLARARELQGRLPAGRIQAVRGQGLLVGVQLDHKVAPVIAQVHEEGLLVNPAGDRTMLFAPPFIVTVRELD

SEQ ID NO: 12174 - protein, 371 aa, Glycine max
  unsure (1)..(371): unsure at all Xaa locations
MDAIRKQASKLREQVARQQQAVLKQFGGGGYGGSDNVVTDGVELQLHQKLEKLYISTRAGKHYQRDIVRGVEGYIVTGSKQVEIGTKLSEDSRKYGAENTCTSGNTLSRAALSFARAHAQMEKERGNLLKALGTQVAEPLRAMVVGAPLEDARHLAQRYDRMRQEAEAQAIEVSKRQAKVREMPPSAENTMKLEAAEAKLQDLKTNMTILGKEAAXALAAVEAQQQRLTLQRIIAMVEAERAYHQIVLQILDQLEGEVTSERRQIETPSTPSLDNTMPPPPSYEEVNGVYASPTHNGSTDSMGYFLGEVLFPYSAVSEVELNLSVGDYVVVRKVTNSGWAEGECKGRAGWFPFSYIERRERVLASKVAEVF

SEQ ID NO: 12175 - protein, 135 aa, Glycine max
KIFVMWLDLVTYLHHHGHEDKLPWYRGKEWSYLRGGLTTLDRDYGWINNIHHDIGTHVIHHLFPQIPHYHLVEATEAAKPVFGKYYREPKKSSPLPFHLIGELIKSFKTDHFVSDKGDVVYYQTDSEINGSSKSE

SEQ ID NO: 12176 - protein, 232 aa, Oryza sativa (japonica cultivar-group); identical to SEQ ID NO: 2850

SEQ ID NO: 12177 - protein, 519 aa, Glycine max
VLWVDVFLICSNAMQYNSSDTIYHRQARVLQEIARKDFENLRQDSDDDSEPQPKIVQRGRPPGKHSRKSLGLGMPPPERVGPESSSDATLASGGDIASGSNGYNLRKVPSKFQPTDSSARAYNSTFNSGGYVGWSEWENEFPASVVKAVLRYGKKQFVVDETRRDTYKNPVTLGNERPMLSTVEDEFKQLLAVGVHMKHSYARSLAHFAADLGPVVWKIAASKISSVLPAGHDFGPGWVSEDDGSSQRRHFPVCDEGRTSDPPVPEDYRSRFSSPSGSLPLANRPFYQSGDMAIDNYQNELNPVINIPGGSESITPMRIQQESMVHSDDFGSCDRLGSNFPSQMKMVRLADLTGTSSAGVVPQMFDMDPIRIRMVRPAVDSSSSGPRVAPLRLVVAPPLLSREPGSEPRPSPKGQYLSKSSQLDSGNLLAREPGFEQRSWARGLPRTPSWQGSEVPTKQNSFALANDINGEIGTTNSSNSNVEAGSQLQPNLALQLCGHIKFFSLNPIILLTNNDNVML

SEQ ID NO: 12178 - protein, 306 aa, Zea mays
MMESHPLQAPTATAPPPGSAEPAGAPPAVTPGKEFTRTCKGLVVVLIGGYVLLQLLPSSLNYLAIIPSKTIPYVWTVFTAGYIEQVLPGDIEPAWGRKEFLKFIILINSICGILAFCFAIGLYYVTGKESFLVTPLSGFHGCLAGFLVALKQLLPNLELPMCFFWKIKAKWMPFFVVCFSSIMAFIVPDSINFLPTLVSGMYVSWLYLRYFQRNPLTGLKGDPSDDFSFPSLFPAAMRPVTDPVANLFDRLLCARSRPLEVALPISDPTKASRRRERGERVLEERLAADNAGDTEASPRGHGTAED

SEQ ID NO: 12179 - protein, 450 aa, Streptomyces coelicolor A3(2)
MTVNAKTSPSAGNTWRDLPAAQQPEYPDTEALRAVIADLESYPPLVFAGECDQLRARMAAVAKGEAFLLQGGDCAEAFDAVSADHIRNKLKTLLQMGAVLTYAASVPVVKVGRIAGQYSKPRSKPTETRDGVTLPTYRGDSVNGFDFTEAARIPDPERLKRMYHASASTLNLVRAFTTGGYADLRQVHAWNQDFVKSSPSGQRYEQLAREIDNALNFMRACGTDPAEFQTVEFFSSHEALLLDYESALTRVDSRTGQLYDVSGHMVWIGERTRQLDHAHIEFASRIRNPIGIKLGPSTTAEEALQYIERLDPEREPGRLTFIVRMGADKIRDKLPELVEKVTASGATVAWITDPMHGNTYEAASGHKTRRFDDVLDEVKGFFEVHKSLGTHPGGIHVELTGDDVTECVGGGDEIFVDDLHQRYETACDPRLNRSQSLDLAFLVAEMYRDQ

SEQ ID NO: 12180 - protein, 408 aa, Ralstonia solanacearum
MTTAATHPSYALETRYGARNYAPLPVMLERGEGVWLFDTAGRRYLDMMSAYSAVSFGHSHPRLVAALVEQAGRLTLTSRAFHNTELGPFLADVCRITRMDRALPMNTGAEAVETAIKAARKWAREVKGTPPDAAEIIVFDNNFHGRTTTIVGFSSHEQYRYGFGPFAAGFRRIPFGDAEALKAAIGPHTGAILIEPIQGEGGIVVPPPGYLKLARDLATQHNALLVCDEVQTGLGRTGDVLASWHEDVQPDLVVLGKALGGGMVPVSAIAGREDVIGVFQPGDHGSTFGGNPLAAHIGRAALALLQEAQLPRHAARLGEAFIAELQSLIGHGVRQVRGRGLMIGLQLDADIDAHDFAAALAGHGVLTKDTYGNVVRLTPPLVIAQQELELARDVIRRTLADWPRRKAA

SEQ ID NO: 12181 - protein, 283 aa, Streptococcus pneumoniae TIGR4
MATIQWFPGHMSKARRQVQENLKFVDFVTILVDARLPLSSQNPMLTKIVGDKPKLLILNKADLADPAMTKEWRQYFESQGIQTLAINSKEQVTVKVVTDAAKKLMADKIARQKERGIQIETLRTMIIGIPNAGKSTLMNRLAGKKIAVVGNKPGVTKGQQWLKTNKDLEILDTPGILWPKFEDETVALKLALTGAIKDQLLPMDEVTIFGINYFKEHYPEKLAERFKQMKIEEEAPVIIMDMTRALGFRDDYDRFYSLFVKEVRDGKLGNYTLDTLEDLDGND

SEQ ID NO: 12182 - protein, 220 aa, Oryza sativa
  unsure (1)..(220): unsure at all Xaa locations
ACIHPSIHPPTPPSRSDSAHAAASRVPDLPRMSGTPLPPPALPPPPGTDMTGICFRDQLWLNTYPLDPNLVFDYFALSPFYDLTCNNESLRPRQIHPLDMSHLTKMTGMEYVLSDVMEPHLFVIRKQRRESPEKSNAMLAYYILDGSIYQAPQLCSVFASRISRAMHHISKAFTTACSKLEKIGHVXETEPDTELFESKTQKEAIYLKGVXRRVDHILMS

SEQ ID NO: 12183 - protein, 461 aa, Salmonella typhimurium
MAEKKPELQRGLEARHIELIALGGTIGVGLFMGAASTLKWAGPSVLLAYIIAGLFVFFIMRSMGEMLFLEPVTGSFAVYAHRYMSPFFGYLTAWSYWFMWMAVGISEITAIGVYVQFWFPEMAQWIPALIAVGLVALANLAAVRLYGEIEFWFAMIKVTTIIVMIIIGLGVIFFGFGNGGQAIGFGNLTEHGGFFAGGWEGFLTALCIVVASYQGVELIGITAGEAKNPQVTLRSAVGKVLWRILIFYVGAIFVIVTIFPWNEIGSNGSPFVLTFAKIGITAAAGIINFVVLTAALSGCNSGMYSCGRMLYALAKNRQLPAAVAKVSRHGVPVAGVALSILILLVGSCLNYIIPNPQRVFVYVYSASVLPGMVPWFVILISQLRFRRAHKEAIADHPFRSIMFPWANYLTMAFLVCVLIGMYFNEDTRMSLFVGVIFLLAVTLVYKVFGLNRHGTAHKVGE

SEQ ID NO: 12184 - protein, 454 aa, Zea mays
  unsure (1)..(454): unsure at all Xaa locations
MSDGKDSLDLSALGAAIPNSAELSAEDKANLVASIKNTLEGLASRHTDVLENLEPKVRKRVEKLREIQGEHDELEAKFFEERAALEAKYQKLYEPLYSKRYEIVNGVVEIEGITKESAAETPEEQKSGDETSAEQKEEKGVPAFWLNAMKNHEILAEEIQERDEEALKYLKDIKWYRISEPXKGFKLEFHFGTNMFFKNSVLTKTYHMIDEDEPILEKAIGTEIEWYPGKCLTQKVLKKKPRKGSKNTKPITKTEDCESFFNFFSPPQVPDDDEEIDEDTAEQLQNQMEQDYDIGSTIRDKIIPHAVSWFTGEAAQDEDFEVMDGEDDDDEDDDDEDDEDEDDDDYDTKKTKGTAGGEGQQGERPAECKQQLRCDVIKLVLLGPLGGGSCWFYGTGGGIFLGHVTCGSVLGFRCYICSSYAWSEDGSWLPLWMSYCLRSLALCTALSSAPTPPR

SEQ ID NO: 12185 - protein, 318 aa, Streptomyces avermitilis MA-4680
MKPDDWEHCSGPVEEPGPGRFAGRTRVISLDPAMRGWLDDRPSYLPPVGIGEVMRAGSVIEVTASNHPDFQPGDHVVGTFGVQEHVVSDGKGAMKIDTSLAPPSTYLGALGMPGMTAYFGLLEVGALKDGETVVVSGAAGAVGSMVGQIAKAKGCRVVGIAGGPEKCALLTDELGFDAAIDYRTEDVRKALRGHAPDGIDVYFDNVGGDILDAALTRLAMHARVVVCGAISQYNNATPVKGPSNYLSLLVRRARMEGLVVFDYAKRYPQATQEISGWIGAGHIKVKEHVVRGTVDDFPETLQMLFRSENVGKLVLELA

SEQ ID NO: 12186 - protein, 492 aa, Mycobacterium tuberculosis H37Rv
MATIHPPAYLLDQAKRRFTPSFNNFPGMSLVEHMLLNTKFPEKKLAEPPPGSGLKPVVGDAGLPILGHMIEMLRGGPDYLMFLYKTKGPVVFGDSAVLPGVAALGPDAAQVIYSNRNKDYSQQGWVPVIGPFFHRGLMLLDFEEHMFHRRIMQEAFVRSRLAGYLEQMDRVVSRVVADDWVVNDARFLVYPAMKALTLDIASMVFMGHEPGTDHELVTKVNKAFTITTRAGNAVIRTSVPPFTWWRGLRARELLENYFTARVKERREASGNDLLTVLCQTEDDDGNRFSDADIVNHMIFLMMAAHDTSTSTATTMAYQLAAHPEWQQRCRDESDRHGDGPLDIESLEQLESLDLVMNESIRLVTPVQWAMRQTVRDTELLGYYLPKGTNVIAYPGMNHRLPEIWTDPLTFDPERFTEPRNEHKRHRYAFTPFGGGVHKCIGMVFDQLEIKTILHRLLRRYRLELSRPDYQPRWDYSAMPIPMDGMPIVLRPR

SEQ ID NO: 12187 - protein, 301 aa, Deinococcus radiodurans
MAHPFRAYSPADFHFPLPEGHRFPYYKYEGVRARLTGLLPILPTPQLRWADAGRAHDPLWLRRWRRGEVDRREQREFGLPWSPEVVTRALRAAGGSLAALHDAQSTGWGANLAGGTHHAFHDRAEGFCLVNDAAILTRIALDRGLARRVATLDLDVHQGNGTASLLTPEMAAGTAFTLSIHGERNYPFRKERSSLDLGLGDGVTDAEYLAVLTGQALPALDAYRPDLLLYLAGADVLAGDRFGRFALTLSGVSARNRAVFRWAQAAGVPIVTMMAGGYNSDHALTVEAHASVVLDGLDVLG

SEQ ID NO: 12188 - protein, 99 aa, Glycine max; identical to SEQ ID NO: 11186

SEQ ID NO: 12189 - protein, 114 aa, Glycine max
  unsure (1)..(114): unsure at all Xaa locations
SLAAGSNITRFADQIRTFKPEADGLINDSLIEELREALADADHKPXIIPGALGGTEAARYPDATTVVTGIVGCAXLKPTVAAIVAGKDIALANKETMVAGATFVLPLAHKHNIK

SEQ ID NO: 12190 - protein, 153 aa, Funaria hygrometrica
MALSLFGGRGSSILDPFEFGSVWDPFSVLENGPSRRFASDAHAVANTRIDWRETPEAHVFKADLPGLKKEEVKVQVVEGRTLEISGERKKEEVQKGDTWHRVERAQGSFMRRFRLPEGTNVDEVKAQVQDGVLTVTIPKLQKPKPQVRQIEIA

SEQ ID NO: 12191 - protein, 472 aa, Oryza sativa
MATFFSSSTNQRDLTGGGGDGGGLSLSLGTQVPVSLYQYRPAGMAAASLLSPSQSSPMAGRSAQNSIYVQNSRFLRAARELLDEVVNVRDAIKRKGDKNQGKAGECKGGDAAGDDKAGSNPQEQESNSAPELSPSERQDLQNKVTALMAMLDQTISRHFRSLRDAIGAQAQAARRGLGEQDASAQGGGGLSRLRYIDQQLRQQRAMQQFGMMQQPQHAWRPQRGLPESAVSVLRAWLFEHFLHPYPKDSEKLMLARQTGLSRGQVSNWFINARVRLWKPMIEEMYKEEFGAEMDSNSSSENGGGGGGKGKDEAISSEDRDEFQSPLNNPFKSEAMGGAALDVGVGVVGLSSCLGGAMGTYATGLNLNHHVHHPGAGGTSLLHDALHHHHHGGGGDARFVSYGDMADLGGGGGYDGGSVSLTLGLQHCNNAGPVPAEQQGLLYGSAGDFDYINGSDDRQRFGPASQLLHDFVA

SEQ ID NO: 12192 - protein, 114 aa, Zea mays; identical to SEQ ID NO: 4579

SEQ ID NO: 12193 - protein, 491 aa, Saccharomyces cerevisiae
MSNPIENTENSQNTSSSRFLRNVQRLALNNVTNTTFQKSNANNPALTNFKSTLNSVKKEGSRIPQFTRESVSRSTAAQEEKRTLKENGIQLPKNNLLDDKENQDPSSQQFGALTSIKEGRAELPANISLQESSSAKEIIQHDPLKGVGSSTEVVHNSVENEKLHPARSQLQVRNTESETDSGKKRPISTIVEQELPKKFKVCDENGKEEYEWEDLDAEDVNDPFMVSEYVNDIFEYLHQLEVITLPKKEDLYQHRNIHQNRDILVNWLVKIHNKFGLLPETLYLAINIMDRFLGKELVQLDKLQLVGTSCLFIASKYEEVYSPSIKHFASETDGACTEDEIKEGEKFILKTLKFNLNYPNPMNFLRRISKADDYDIQSRTLAKFLLEISLVDFRFIGILPSLCAAAAMFMSRKMLGKGKWDGNLIHYSGGYTKEELAPVCHMIMDYLVSPIVHDEFHRKYQSRRFMKASIISVQWALKVRKNGYDIMTLHE

SEQ ID NO: 12194 - protein, 228 aa, Gossypium anapoides
  unsure (1)..(228): unsure at all Xaa locations
FTSLCHTDVYFWEAKGQTPLFPRIFGHEAGGIVESVGEGVTHLKPGDHVLPVFTGECGNCRHCKSKESNMCDLLRINTDRGVMLSDGKTRFSINGKPIYHFVGTSTFSEYTVAHVGSVAKINPAAPLDKVCIXSCGISTGLGATLNVAKPAKGSTVAIFGLGAVGLAAAEGARIAGASRIIGVDLNPNRFEEAKKFGCTEFVNPKDHNKPVQEVLAEMTNGGVDRSVE

SEQ ID NO: 12195 - protein, 387 aa, Synechococcus sp. PCC 7942
MGESLSPQALAQPLLLQLFVDTRPLSQHIVQRVKNILAAVEATVPISLQVINVADQPQLVEYYRLVVTPALVKIGPGSRQVLSGIDLTDQLANQLPQWLVQQEAFFADREPPEVNIPFTELGQPETPALQQADALFQLQQQYADLSERTKFLEQVIALVAHDLRNPLTAALLAVDTIQIRSQSFSVATAKEMQGLCSLFDQARSQLREIERMIAEILEATRHSGESLRINPREVVFEPLLQQVLEQLHERWRSKQQQLITDVPGDLPTLYADPDRLRQVLVNLLDNAIKYTPPGGTITIAALHRTSQKVQISISDTGSGIPRDQLSVIFKNLVRLSRDSSQEGYGIGLSVCQRIVQAHFGRIWVASELGQGSTFHFTMPVYRYTMPC

SEQ ID NO: 12196 - protein, 377 aa, Lactococcus lactis subsp. lactis
MTNLFENYGRLPFSLIKGEDQYLFDDRGNKYLDFTSGIGVMNLGYSFEKGKVAVKAQLDSLSHLSNLYQNPLQEDVAEKLSQNHSYKAFFCNSGTEANEAALKLTHLIKKDQKILAFTDGFHGRTFGAMSATMQEKIQAGFSPLLPNFVASPFNDVVALEQILEKEKIGAIIFEIIQGEGGVLPISPDFVEALKSCQQKGILLIIDEIQTGIGRTGKLFAFEHFDFEPDIFTLAKALANGIPTGAMLAKNKYASYFSAGKHGSTFGGNPLAMASANEVLKEIDSDFLEKVTDKGIFFLKLLTEKLSVKATVKSIRGLGLMIGIQLTDEKKVPEVLALLRENGLLALSAGHDVIRLLPPLVMTKVELQKGAELLEKIL

SEQ ID NO: 12197 - protein, 392 aa, Hiraea fagifolia
DLEPVNPADVPVTAVGALKSYKLAAKAISRLQSLPSGNISLLCDVLVKEVRDLTGYDRVMVYKFHEDEHGEVVSECRRPDLESYLGLHYPATDIPQASRFLFMKNKVRMICDCLAPPVKVIQDKRLPQPLSLCGSTLRSPHGCHAQYMTNMRTIASLVMSVTINEDDDTMDGDRQQMTRKLWGLVVCHHASPRFVPFPLRYACEFLIQVFGVQINKEVELAAQVREKHILQIQTMLCDMLLRDAPVAIITQSPNVMDLVKCDGAALYFKNKIWLLGVTPKEEQIRDIAEWLLEYHSGNTGLSTDSLMEAGYPGASVLGDAVCGMAAVSITSRDFLFWFRSHTAKEIKWGGAKHDPGDKDDGRKMHPRSSFKAFLEVVKWRSMPWEDIEMDAI

SEQ ID NO: 12198 - protein, 317 aa, Nostoc punctiforme
MELQVQPKLIIHGGAGSSLHGKGGLETVRRSLHTVIEEVYSLLLSGATASEAVVQGCQMLEDNPRFNAGTGSVLQSDGQIRMSASLMDGTLGRFSGVINISRVKNPIELAQFLQNSPDRVLSDFGSAELAREMQLPSYNALTDLRLQEWMQERQDNFKSTMAGVVAEPELLETSNAGRGTIGVVALDVFGRLAAGTSTGGKGFERIGRVSDSAMPAGNYATSNAGVSCTGIGEDIIDECLAPRIVVRVTDGMSLKEAMQRSFGEAHQNKRDLGAIALDASGAIAWGKTSEILLAAYHDGEKIGDTLEWNDSELIGYC

SEQ ID NO: 12199 - protein, 394 aa, Zea mays subsp. mays
  unsure (1)..(394): unsure at all Xaa locations
LGAARRARLPPGEMGWPLVGGMWAFLRAFKSDKPDAFIASFVRRFGRTGVYRSFIFSSPTVLLTTPEGCKQVLMDDDAFVTGWPKATVALVGPRSFVAMPYDEHRRIRKLTAAPINGFDALTGYLPFIDRTVTSSLRAWADHGGSVEFLTELRRMTFKIIVQIFLGGADQATTRALERSYTELNYGMRAMAINLPSFAYRGALRARRRLVAVLQGVLDERRXARAKGVSGGGVDMMDRLIEAQDERGRRLDDDEIIDVLVMYLNAGHESSGHITMWATVFLQENPDMFARAKAEQEAIMRSIPSSQQGLTLRDFRKMEYLSQVIDETLRLVNISFVSFRQATRDVFVNGYLIPKGWKVQLWYRSVHMDPQVYPDPTKFDPSRWEGHSPRAGTFL

SEQ ID NO: 12200 - protein, 453 aa, Pseudomonas putida KT2440
MSVNNPQTREWQTLSGEHHLAPFSDYKQLKEKGPRIITKAQGVHLWDSEGHKILDGMAGLWCVAVGYGREELVQAAEKQMRELPYYNLFFQTAHPPALELAKAITDVAPKGMTHVFFTGSGSEGNDTVLRMVRHYWALKGKPHKQTIIGRINGYHGSTFAGACLGGMSGMHEQGGLPIPGIVHIPQPYWFGEGGDMTPDEFGVWAAEQLEKKILEVGEDNVAAFIAEPIQGAGGVIIPPETYWPKVKEILARYDILFVADEVICGFGRTGEWFGSDYYDLKPDLMTIAKGLTSGYIPMGGVIVRDTVAKVISEGGDFNHGFTYSGHPVAAAVGLENLRILRDEKIVEKARTEAAPYLQKRLRELQDHPLVGEVRGLGMLGAIELVKDKATRSRYEGKGVGMICRTFCFENGLIMRAVGDTMIIAPPLVISHAEIDELVEKARKCLDLTLEAIQ

SEQ ID NO: 12201 - protein, 366 aa, Aeropyrum pernix
MVLKIVYHEDFLKHSPDPYDHPENPSRLVEAVRGLEESGVYKHLEAVTPPVGDVGLYTRVHSPAYLRHVLSTAESGLDWLDPDTYVGPGTLVALKRLGGASVEVYNIVRSGGEALLLGRPPGHHAGIRGRALGAPTAGFCIVNTAALIARMLSEQGKTVILDFDLHHGNGTQEIFYDDPDVYHVDVHQDPTTIYPGTGFPEDIGEGDAKGTKINIILPPNSGDDIYVSAARLALGILERLEPDYIVVSAGFDAYRGDNAFTVMRGGTAMYYLIGSELSRMARRGVAAVLEGGYGVGLRRALPAFAAGLANLENPYPDTEEESPPSVKRMYVAGLKRLAAAIKGLNRVVEEAVLEELERGGWEKRYG

SEQ ID NO: 12202 - protein, 445 aa, Zea mays
MEVHADVDGSGVPLAVLLKRELCNQKVERPDILFGEANKSKKGEDFTLLLPRCHRTTGEGGGSGGGENAGDDDDDTISVFAIFDGHNGSLAAIYTRENLINNVLAAIPPNLTSEEWTAALPRALVAGFVKTDKDFQIKAARSGTTVTFVIIDGWVVTVASVGDSRCILESAEGSVYFLSADHRLDANEEEVERVTASGGEVGRINIAGGAGIGPLRCWPGGLCLSRSIGDIDVGEFIVPVPHVKQVKLSNAGGRLVIASDGVWDALCFQEALNYIRGLPAEAAANRIVKEAVTSKGLRDDTTCIVVDILPPEKLSPPLKRPGKGVIKTLFRRRPSDEMSEDQMDRGCLEPDVVEEIYEEGSAMLARRLNINYPSGNMFKLHDCAVCQLEMKPGEGTSVHGNMPKHSRVDPWGGPFLCSSCQLKKEAMEGKLHSRNSQFDVRPMPK

SEQ ID NO: 12203 - protein, 382 aa, Phanerochaete chrysosporium
MAFASSLLALVALAAVTSAAPATTQATCPDGTKVNNAACCAFIPLAQDLQETIFQNDCGEDAHEVIRLTFHDAIAISQSKGPSAGGGADGSMLLFPTIEPNFSANNGIDDSVNNLIPFMQKHDTISAGDIVQFAGAVALTNCPGAPQLEFLAGRPNKTIPAIDGLIPEPQDSVTSILERFKDAGNFSPFEVVSLLASHSVARADKVDETIDAAPFDTTPFVFDTQIFLEVLLKGVGFPGTANNTGEVASPLPLTSGSDTGELRLQSDFALARDERTACIWQGFVNEQALMAASFKAAMAKLAVLGHDRNTLVDCSDVVPAPKPAVNKPASFPATTGPQDLELSCNTKPFPSLSVDAGAQQTLIPHCSDGDMTCQSVQFNGPA

SEQ ID NO: 12204 - protein, 351 aa, Clostridium beijerinckii
MKGFAMLGINKLGWIEKERPVAGSYDAIVRPLAVSPCTSDIHTVFEGALGDRKNMILGHEAVGEVVEVGSEVKDFKPGDRVIVPCTTPDWRSLEVQAGFQQHSNGMLAGWKFSNFKDGVFGEYFHVNDADMNLAILPKDMPLENAVMITDMMTTGFHGAELADIQMGSSVVVIGIGAVGLMGIAGAKLRGAGRIIGVGSRPICVEAAKFYGATDILNYKNGHIVDQVMKLTNGKGVDRVIMAGGGSETLSQAVSMVKPGGIISNINYHGSGDALLIPRVEWGCGMAHKTIKGGLCPGGRLRAEMLRDMVVYNRVDLSKLVTHVYHGFDHIEEALLLMKDKPKDLIKAVVIL

SEQ ID NO: 12205 - protein, 378 aa, Microscilla sp. PRE1
MKIKTRIMSLKSKAAIATGDGAFIIDTTEVSSPQPDEVLVRIRAAGLCHTDHDSLRWGKSIVMGHEGAGVVEQVGNQVDALAPGDKVILNWATPCMQCYQCQEGNQHICENHSPVAAGANGHTPGHAHLEGTQWQGKPIERSFNIGTLSEYTLVKASACVKMDGDIPMSSASIISCGVMTGYGSVVNSARLTAGSSSVVLGTGGVGLNVIQGCRISGASKIIAIDINPQRLEMAKVFGATHTILADKNDLGLMQASEEVKKLTSGRGADYAFECTAISALGAAPLAMIRNAGTAVQVSGIEEEITIDMRLFEWDKLYINPLYGKCRPQLDFPKLESLYHKGELKLDEMITRTYQLEDLQQAFDDMLSGKNAKGVIVFD

SEQ ID NO: 12206 - protein, 427 aa, Ralstonia metallidurans
MTHVFHRNPKQTLPVAVGGQGIELIDSNGRRYLDASGGAAVSCLGHGHPRVIEAIKAQVDTIAYAHTSFFTTEVSETLAQTLADAAPGDLDHVYFVSGGSEAVEAALKLARQYFVEIGQTQRRHFIARRQSYHGNTLGALAIGGNAWRREPFLPLLVPAHHVSPCYAYRDQAAGEADTQYAQRLADELEAKILELGPDSVAGFVAETVVGATAGAVPPVADYLKRIRAVCDKYGVLLILDEVMSGMGRTGYLFACEEDGVVPDIVTIAKGLGAGYQPIGAMLSTSRIYDAIIGGSGFFQHGHTYIGHATACAAALAVQRTIVEDKLLDNVLARGEQLRARLRESLGDHPNLATCGAVDCSSAWSSWPIAPPRPRSTRRRRRTPCSSAPAWSMACWFIRWAARSMASTVTTCCLRRRLSARPPTSTTS

SEQ ID NO: 12207 - protein, 360 aa, Austrobaileya scandens
PFYAILHRIDAGLIIDLEPVNPADVPITAAGALKSYKLAAKAISRLQSLPSGNIGLLCDVLVQEVSELTGYDRVMAYKFHEDEHGEVIAEYRRSNLEPYIGLHYPATDIPQASRFLFMKNKVRMICDCFAPPIKVIQDKKLAQPLSLCGSTLRAPHGCHAQYMANMGSVASLVMSITVNDDDDETIGEQQNQQKGRKLWGLVVCHHTSSRFVPFPLRYACEFLIQVFGIQLNKEVELAAWMREKHILQMQTLLCDMLLRDAPVGIMTQSPNVMDLIKCDGAALYYGKQLWLLGTTPTEAQIRDIAGWLLEYHGGTTGLSTDSLMEAGYPAAAALGDGVCGMAAAKLTSKDFLFWFRSHTA

SEQ ID NO: 12208 - protein, 112 aa, Glycine max
  unsure (1)..(112): unsure at all Xaa locations
RWCAAVGASPEHSGLRPLSITLMGFMFLLLSALLGYIYSPQLDTAPPRWVHFAHGLLLFLYQTFDAVDGKQARRTNSSSPLGELFDHGCDALACTFEALXFGSTAMCGRXXF

SEQ ID NO: 12209 - protein, 255 aa, Triticum aestivum
MYGWEMLSFNIHDGFLEAIVRGNRSGLLTAADYNNLCQCETLDDIKMHLTATEYGPYLQNEPSTLHTTTIVEKCTLKLVDEYKHMLCQATEPLSTFLQYITYGHMIDNVVLIVTGTLHERDVNELLEKCHPLGMFDSIASLAVAQNMRELYRLVLVDTPLAPYFSECITSEDLDDMNIEIMRNTLYKAYLEDFYKFCEKLGGATAEIMCDLLSFEADRRAVNITINSIGTELTRDDRRKLYSNFGLLYPYGHEEL

SEQ ID NO: 12210 - protein, 167 aa, Glycine max
MESTKEQSGMLHKILPPRLEDAGLEDPALPPDSIHEAFLKAAAAVKSRAASIFSSTDDDNDGGCVSDPWPSAKDASDAVIGVESENELPGSCIVERGVEPVADEVKVAGEGGDASADVVVEGGDKLGEDVEACVDELQGLDIKDVKKGGEEDDEEENKKPTLVEGYV

SEQ ID NO: 12211 - protein, 313 aa, Magnetospirillum magnetotacticum
PAAHYQQVASGVLAMSLPKPVDNGVLWFRPEVKENINWSGDPRKPLDLENSDAGLRLRPRTSFEIWKVEMAGISTKWSHGDLFAANDLRRSALENDLARQVRREQEAVRARDELVAVVSHDLRNPMTVISMLCGMMQKAFSSDGPHTSRRISTAIDTMQQAAGRMNTLLEDLLDTSKIDAGRYTIAPQKLDVAQMFEEAQSLLAPLALDKDISISFEADPDLSIHADPERLFQVLSNLVGNAIKFTPRLGTVDVYAKSVGDDIVFTVRDSGEGIPKDHLPHVFDRYWTVKEGNPTGTGLGLYITQASSSPWYV

SEQ ID NO: 12212 - protein, 489 aa, Clostridium acetobutylicum
MSAELEKDKNGELKRSLKTRHMNMIAIGGSIGTGLFFTSGNTISTAGPGGAIAAYAIMGVLVYFLMTSLGEMATMIPNAGSFETYASKFVDPALGFALGWNYWFNWAITVAAELVAGGLVVKFWLPNTGTTIWSIGFLVILFGLNLLSAKAYGEGEYWFSSIKVVTIIVFLIMGVLIIFGIMGGHGVGFSNWVLKDGKGNSAPFVGGGMAILMSFLTAGFSFAGTEVVGLAAGEAENPEKDVPKAINSVFWRILIFYIGAIIVIGFIIPFNDSNLLKNGVSDIAYSPFTIVFKRSGIALAASIMNAVILTSVLSCGNSGLYAGSRMMYAMAKEGKAPKIFGKLNKSGVPLNALIFTSVIASTAFFASLIGDGKIYSILYNLSGITTFITWLGIAICHYRFRKAYIAQGNKIEDLKYKALLYPFGPIFAMILCTVVLFGANIWVFQAKTFSWFDFTTNYGSIPLFLCFYFIYKKVHKTRIVSLMECDLNK

SEQ ID NO: 12213 - protein, 261 aa, Persea americana
QVHPNSYALVVSTENMTLNWYSGNNRAMLVTNCLFRMGGAAILLSNRWSDRRRSKYQLVHTVRTHIGADDRAFNCVSQEEDEAGKVGVSLSKDLMVIAGEALKSNITTLGPMVLPMSEQLLFFATLAARKVFKMKIKPYIPDFKLAFEHFCIHAGGRAVLDELQKNLELSDWQMEPSRMTLYRFGNTSSSSLWYELGYSEAKGRVMKGDRMWQIAFGSGFKCNSAVWRALRSVNPAKEKSPWMDDIDSFPVHVPKVTTIQS

SEQ ID NO: 12214 - protein, 421 aa, Zymomonas mobilis
MTFPQSRLRKDCVIKFIPVYLSGLSILALFIIAVSHVSVGWPILSLMLIVILWGWWFKNISEASTPFPESKSGNSLTDPAYPFSQATAADIIIAMDEPALLVNQGQVEVANRAAENLLGMHIEGGDIRMAIRHPAAIRLLTEPLDNMTPVLLAGLGGVNRRWELYAYPLNEEQRLILLRDQSTAHLTEQVRIDFVANTSHELRTPLATLSGFIETLEDDDVIKERDTRHHFLSIMAREAKRMQNLVDDLMSLSRIEAGKFSLPHDIVHMSPVVEEVVSNIQASGQAKATQITLENHLSSDSLQGDRAELTQLLYNIIGNALKYGRKDGIIKVALDNTDDHRIKLAIADEGDGIPYHHIPRLTERFYRVDNSRSRALGGTGLGLAIVKQIVEHHRGELLIDSLPGKGTTVTVFLPTTDFFPE

SEQ ID NO: 12215 - protein, 144 aa, Zea mays
MSDGKDSLDLSALGAAIPNSAELSAEDKANLVASIKNTLEGLASRHTDVLESLEPKVRKRVEKLREIQGEHDELEAKFFEERAALEAKYQKLYEPLYSKRYEIVNGVVEVEGITVESAAETPAEQKTGDETLLSNPPPRALRYQ

SEQ ID NO: 12216 - protein, 374 aa, Reissantia indica
ALSIAGAVQSQKLAVRAISQLQSLPGGDIKLLCDTAVESVRNLTGYDRVMVYKFHEDEHGEVVAESRRPDLEPYIGLHYPATDIPQASRFLFKQNRVRIIVDCHASPVSVIQDDGLMQPLCLVGSTLRAPHGCHAQYMENMGSIASLAMAVIINGNDEDRMGGRNPTRLWGLAVCHHTSARCIPFPLRYACEFLMQAFGLQLNMELQLAAQLLEKHVLKTQTLLCDMLLRESPTGIVTQSPSIMDLVKCDGAALYYQANYYPLGVTPTEAQIKDIVEWLLAFHGDSTGLSTDSLADAGYPGATSLGDAVCAMAVAYITNRDFLFWFRSHTAKEIKWGGAKHHPEDKDDGQRMHPRSSFKAFLEVVKSRSLPWEN

SEQ ID NO: 12217 - protein, 46 aa, Picea mariana
GSLDEFSFEDYLNDPRESETFVPADMHHGMEVRLGLSKGSVCRSFM

SEQ ID NO: 12218 - protein, 512 aa, Neurospora crassa
MLQELLSLAQGPYALPILAASLVAYLLVSITITYRRLSHFPGPFLASFSPLFMLKVLFSGHHADGYSRLNQQYQSPLVRIGTTDLITDDPAIIRHMNGARSAWGRSNWYRAMTLDPRGGSLFDEPNTKTHDLFKARLSFGYSGRENPGLEGDIDEVIGMLIQYIKSRYISDDERGVLKRMDLAKVTQFFTLDVITRIAYGKEFGWLKTDKDQFEWTSTVIKAVPANSLIAELPLLQKIFLSKWFLQWFGPKHSDANGMGRVMGMAREMVAKRFGEKAEDRKDMLGSFVRHGIEQQACEVEVLFQILAGSDTTAVAIRSTFFHLATSKKAYVRLLEEIDRAVKEGEVSSPIRAEEAKHLEYLQACVYEGLRMQAPFSGLCMKSPPKGGDFINGMFIPEGTRVGHNFGGLIRRRDVFGEDADVFRPERWLNAEPAKRLEMQQTTEMVFGYGRWACLGKPVALMELSKVFFEFFRRFDLQLVEPKNPWHEFNVNMCFQSDLWVKITERFPEGEKV

SEQ ID NO: 12219 - protein, 169 aa, Synechococcus sp. PCC 7002
MNNSPTTFCPVPEEQQPLNEYDQLKESWFFSWGNMEMVCYIRKVAWVWFWATLIFTPIAWASFPFDRYPIKLVLSANLGGMFLLSLVLLRLYLGWRYIRDRLQTEKLTYEESGWYDGQIWRKPEAVLQRDRLIVSYQIAPILARIQQTSLIVVGDRHRFDQRSVAAINP

SEQ ID NO: 12220 - protein, 198 aa, Chlamydomonas reinhardtii
MAKATTIKDAIRIFEERKSVVATEAEKVELHGMIPPIEKMDATLSTLKACKHLALSTNNIEKISSLSGMENLRILSLGRNLIKKIENLDAVADTLEELWISYNQIASLSGIEKLVNLRVLYMSNNKITNWGEIDKLAALDKLEDLLLAGNPLYNDYKENNATSEYRIEVVKRLPNLKKLDGMPVDVDEREQANVARGG

SEQ ID NO: 12221 - protein, 213 aa, Zea mays; identical to SEQ ID NO: 3372
  unsure (1)..(213): unsure at all Xaa locations

SEQ ID NO: 12222 - protein, 61 aa, Zea mays
LLWHPDCNTNNIYITSDQDLIISYCKADSTDSTSEENGEHNFFNVYFYRTLTPLSCNAGVP

SEQ ID NO: 12223 - protein, 228 aa, Gossypium pulchellum
  unsure (1)..(228): unsure at all Xaa locations
FTSLCHTDVYFWEAKGQTPLFPRIFGHEAGGIVESVGEGVTHLKPGDHVLPVFTGECGNCRHCKSKESNMCDLLRINTDRGVMLSDGKTRFSINGKPIYHFVGTSTFSEYTVAHVGSVAKINPAAPLDKVCILSCGISTGLGATLNVAKPAKGSTVAIFGLGAVGLAAAEGARIAGAXRIIGVDLNPNRFEEAKKFGCTEFVNPKDHNKPVQEVLAEMTNGGVDRSVE

SEQ ID NO: 12224 - protein, 437 aa, Neurospora crassa
MAPSAGCEHTPMHLPALSTASSINASVLHGPRDLRLERRTIEEPELGELQVAVKTTGICGSDVSYYKKFANGDLCACMPLSLGHESSGVVVAIGPQVSGFSLGDRVALEVGVACGQCTICRKGRYNLCKKMRFRSSAKSVPHYQGTLQERINHPAIWCHILPDHISFDAAALLEPLSVGIHAVNRASPAPGSTALVLGAGTVGLLTAAMARQAGCTQVTITDVDQGRVDHAIFKGFATHGYLVPRSHHISSSSSSMFPNSNSNSSSGSSTPSDGIATPPSTLSFRSSLDSAKALAADVLTQTQNPVLDRDDEDIGVDVTFECTGKEVCMHTALYATRPGGKVIMVGMGTPIQTLPLSVAHLREIDILGVFRYANTYATGIRMLCNQKGSGAGFTLPSLDDMVTHRFKGLENAKGAFELASRTMDNEGNLVLKVVIEA

SEQ ID NO: 12225 - protein, 400 aa, Escherichia coli
  unsure (1)..(400): unsure at all Xaa locations
GKQLTILGSTGSIGCSTLDVVRHNPEHFRVVALVAGKNVTRXVEQCLEFSPRYAVXDDEASAKLLKTXLQQQGSRTEVLSGQQAACDXAALEDVDQVXAAIVGAAGLLPTLAAIRAGKTILLANKESLVTCGRLFXDAVKQSKAQLLPVDSEHNAIFQSLPQPIQHNLGYADLEQNGVVSILLTGSGGPFRETPLRDLATXTPDQACRHPNWSXGRKISVDSATXXNKGLEYIEARWLFNASASQXEVLIHPQSVIHSXVRYQDGSVLAQLGEPDXRTPIAHTXAWPNRVNSGVKPLDFCKLSALTFAAPDYDRYPCLKLAXEAFEQGQAATTALNAANEITVAAFLAQQIRFTDIAALNLSVLEKXDXREPQCVDDVLSVDANAREVARKEVXRLASSA

SEQ ID NO: 12226 - protein, 291 aa, Arabidopsis thaliana
MSPATYLETSNWLFQENRGTKWTAEENKKFENALAFYDKDTPDRWSRVAAMLPGKTVGDVIKQYRELEEDVSDIEAGLIPIPGYASDSFTLDWGGYDGASGNNGFNMNGYYFSAAGGKRGSAARTAEHERKKGVPWTEEEHRQFLMGLKKYGKGDWRNIARNFVTTRTPTQVASHAQKYFIRQVNGGKDKRRSSIHDITTVNIPDSPDAAAADNATANAPCSPPSVGGNQRETSEWEGQTLYDETAAAFYNQNAFSETLLGMSSTPYMAKLQEQSFLNASQFESYNAYLQM

SEQ ID NO: 12227 - protein, 99 aa, Zea mays
  unsure (1)..(99): unsure at all Xaa locations
NCGLFLDDPKAFFVNHVDDVXKAFPGPLTPLKDWFRGSKIPDGNPPNKFGLGNKPARKEYPLKVIQEPPESWEKLVKKNIPAGELSLACFWPMEPPPFF

SEQ ID NO: 12228 - protein, 359 aa, Nostoc punctiforme
MPSNIITFNNPLGSEKSEDTTKLPFNLQDLKAAIPAECFQPNVKKSLFYFFRDILIIGLLYAVASYLDSWLFFPIFWLMQGTMFWALFVVGHDCGHQSFSKHKWLNDLIGHLSHTPILVPYHGWRISHRTHHKNTGNIDNDESWYPVSESQYKEMPLAQKIGRYYVFLLAYPVYLFKRSPNKEGSHFLPGSSLFKPSEKWDVITSTVLLIGMVGLLGFLTYQWGWMWLLKYYAVPYLVFIVWLDLVTFLHHTEPELPWYRGEDWTFLKGAISSIDRDYGLVNHIHHDIGTHVAHHIFLNIPHYNLLKATEAIKPVMGEYFHKSEEPIWKSLWNSCISCHFVPDTGSRVYYTSNNKLAKD

SEQ ID NO: 12229 - protein, 95 aa, Oxalis cf. tuberosa EE259
LYAGINISGTNGEVMPGQWEYQVGPSVGIEAGDHIWASRYILEGITEQAGVVLTLDPKPIDGDWNGAGCHTNYSTKSMRDEGGFEVIKKAILNLS

SEQ ID NO: 12230 - protein, 324 aa, Streptococcus pneumoniae TIGR4
MKTRITELLKIDYPIFQGGMAWVADGDLAGAVSKAGGLGIIGGGNAPKEVVKANIDKIKSLTDKPFGVNIMLLSPFVEDIVDLVIEEGVKVVTTGAGNPSKYMERFHEAGIIVIPVVPSVALAKRMEKIGADAVIAEGMEAGGHIGKLTTMTLVRQVATAISIPVIAAGGIADGEGAAAGFMLGAEAVQVGTRFVVAKESNAHPNYKEKILKARDIDTTISAQHFGHAVRAIKNQLTRDFELAEKDAFKQEDPDLEIFEQMGAGALAKAVVHGDVDGGSVMAGQIAGLVSKEETAEEILKDLYYGAAKKIQEEASRWTGVVRND

SEQ ID NO: 12231 - protein, 72 aa, Zea mays
MDNPEMQRFLQQEQQKAMMNEMVGKLTSVCWDKCITSAPGSKFSSGESTCLTNCAQRFLHISVLIAKRFEMQ

SEQ ID NO: 12232 - protein, 95 aa, Oxalis tuberosa
LYAGINISGTNGEVMPGQWEYQVGPSVGIEAGDHIWASRYILERITEQAGVVLTLDPKPIDGDWNGAGCHTNYSTKSMRDEGGFEVTKKAILNLS

SEQ ID NO: 12233 - protein, 378 aa, Medicago sativa
MAIHHHHQQHTCSLFDALYCDEEKWEDDEGEVVDEGEQSDVTTTNYDILDSTSLLPLLLLEQNLFNEDEELNTLFSKEKIQQETYYEDLKNVINFDSLSQPRREAVEWMLKVNAHYGFSALTATLAVNYLDRFLLSFHFQKEKPWMIQLVAVTCISLAAKVEETQVPLLLDLQVQDTKYVFEAKTIQRMELLILSTLKWKMHPVTTHSFLDHIIRRLGLKTNLHWEFLRRCENLLLSVLLDSRFVGCVPSVLATATMLHVIDQIEQSDDHGVDYKNQLLNVLKTSKEKVDECYNAILHLTNANNYGHKRKYEEIPGSPSGVIDAVFSSDGSNDSWTVGASSYSTSEPVFKKTKNQGQNMNLSPINRVIVGILATATSP

SEQ ID NO: 12234 - protein, 352 aa, Cochliobolus heterostrophus
MYQNKSLIFKNPPIGWPKPDVDFGVECRPIDINGDIPLGGVILKNCYVSLDPYQRGRMRAPTVDSYSPPFTIGDPMEGHVISRVIRSASTKLQPGDFVSGVGPIQEFSVLSAGVVDGFTRIENPYNLNLEIFLGPLGMPGLTAYSSFYEIGKPKKGETIFISAASCAVGQLVGQLAKREGLYVIGSVGDDEKVEFITKGLGFDVGFNYKKEVIGEALMRVAPEGIDIYFDNVGGQTLESALYAMRPRGRIVVSGMISQYNLQPSELYGVKNLFMVITNRITIQGFIVTDSDMGPKYSAEHLKNVSQWIYDGSLKPKIHVDTGMDHACQSFINMLKGRKIGKAVLQIADLNGD

SEQ ID NO: 12235 - protein, 362 aa, Bacillus coagulans
DPEGNSYMDMLSAYSAVNQGHRHPKIIEALKNQADKVTLTSRAFHNELLGPWTKRMAKLTKKDKVLPMNTGVEAVETAIKAARRWAYQVKGVTENQAEIIAADGNFHGRTLNAISLSNDPDATKNYGPFVPGINKVSYGDINAIEKAITENTAAIILEPIQGEAGIIIPPEGYLKKVRELCSERNILFIADEVQTGFARTGKMFACEWENVEPDIYVMGKALGGGVFPISAIAANNEIMDVFTPGSHGSTFGGNPLACAVSMAAIDVIEEENLVNKSLESGKYFADKLRAINFEGIKEVRARGLFIGMEFHQPVRAICEKLKDKGILCKETHVNTIRFAPPLLITKNEMDWAIQRIEEVLTN

SEQ ID NO: 12236 - protein, 452 aa, Medicago sativa
MKEVAPGTQDQKQPLRANSKRALSDVTYLPHKKRAILQDVTNNCGVNTKRSCLNPTEIQAKKRKVAKPAQPHVSNEVPSAAELPPFIADSKPVSSMEMRLRSSEDFRCLDDLEDNAPFRMSSNQCGTNNNLLQSQTSRISARPLSSQKKASQIVAAKKGNISELLDVSKHPDVADIDADFEDPQLCSHYAADIYDHLRVAELSRRPYPNFMETVQQDITPSMRAILVDWLVEVSEGYKLQANTLSLTVYLIDWFLSKNCIERERLQLLGITCMLIATKYEEINAPRIKDFCFIQDNTYTKEEVVKLESLVLKSSSYQLFAPTTKTFLRRFLRAAQASYKRPSIELEYLANYLAELTLMNYGFLNFLPSMVAASSVFLARWTLDQSSHPWNPTLEHYASYKASDLKATVLALQDLQLNSNDDCPLTTIRKKYTQDKLNCVAALSSPKLLETLF

SEQ ID NO: 12237 - protein, 228 aa, Pseudomonas syringae pv. tomato str. DC3000
MQRKGDTPATLDLFADQTPQPRRDEQIGPGSWLFSGFALPAMPTLLLALEQTLGHSPFRHMLTPGGLSMSAALSSCGPLGWITDRHGYRYSDVDPQTGQPWPAMPDAFMQLAQSAALAAGYRGFVPDACLINRYIPGAKMSLHQDKDEHDHRWPVVSVSLGIPAIFQFGGMQRSDKTRRISLFHGDVVVWGGEDRLRFHGILPIKQAEHPLLGEQRINLTFRKAGRDS

SEQ ID NO: 12238 - protein, 347 aa, Thermoanaerobacter tengcongensis
MDGLMTAVVKQYHKEGADIVKKEIPKIGPDEVLIKVKATSICGTDVHIYVWNEWAKSRIKPPKTMGHEFVGEVVEIGENVTSVKVGDLVSAETHIVCGKCRACRTGNAHICENTLILGVDTDGAFAEYIKVPESNVWINDKNIPLEILSIQEPLGNAVHTVFSGDVVGKSVAVIGCGPIGMMAIPLLKRTGAAAIFAIEPADYRRELAHKLGATRVINPLREDVVSIIKSETEGYGADVVLDFSGNPTAIRQGLEYIAKGGRMSILGLPDNEVPIDITNNVVFKGITIQGITGRRMYDTWYTVKGLLKSGLAEDLKPIITHTFPLTEYQKGMELMIKGQCGKVVLYP

SEQ ID NO: 12239 - protein, 508 aa, Yersinia pestis CO92
MSGKHSAETHHAAKKRWLDSHDTGYHKSMGLRHIQMIAIGGSIGTGLFLGTGARLQMAGPALALVYLVCGIFSFFILRALGELVLHRPTSGSFVSYAREFLGEKASYVAGWMYFLNWAMTGIVDITAVALYMHYWGTFSDVPQWLFALGALSIVATMNMIGVRWFAEMEFWFALIKVAAIALFLIVGVIFLGTGQSVAGHTTGIHLITDNGGFFPHGLLPALIMVQGVIFAFAGIELIGTAAGECKDPEKMLPKAINSVIWRIGLFYVGSVVLLVCLLPWHAYQAGQSPFVTFFSNLGVPYIGTIMNIVVLSAALSSLNSGLYSTGRILRSLSMGGSAPKFMSKMSPQSVPYAGILVTVGIYVLGVLLNYLVPSQVFEIVLNIASLGIISSWAFIIICQMKLRQAIKRGMAKPVSFKMPGAPVTSWLTLIFLAGVLVMMAFDYPNGTWTIASIPVLTLLLIAGWFSLRKRANEVAAAPIDVWSQEILFEEPDAQNVSPKELYEQKSVG

SEQ ID NO: 12240 - protein, 216 aa, Dendrobium sp. XMW-2002-8
MGRSPCCEKAHTNKGAWTKEEDERLVAYIKVHGEGCWRSLPKAAGLLRCGKSCRLRWINYLRPDLKRGNFTEEEDELIIKLHSLLGNKWSLIAGRLQGRTDNEIKNYWNTHIRRKLLSRGIDPTTHRPLHGQADASFVNEVEKVVSFRRREDENKSSNSSSSNSRSNSEEAKRWRCPDLNLELCISPPLQKQEDSEEDMMREEFGLCFTNGLLEFR

SEQ ID NO: 12241 - protein, 95 aa, Oxalis humbertii
LYAGINISGTNGEVMPGQWEYQVGPSVGIEAGDHIWASRYILERITEQAGVVLTLDPKPIDGDWNGAGCHTNYSTKRMRDEGGFEVIKKAILNLS

SEQ ID NO: 12242 - protein, 396 aa, Oryza sativa
  unsure (1)..(396): unsure at all Xaa locations
XWTEYFAAAVSDGSKQMRCMEVKCTAICDEAVVRLLLHGKHPGAAARLDRRLLEACVEASDAVRWCPSAPHCGRAIRVDGGGGGEERYAEVSCPCGAVFCFRCGGGAHSPCPCPMWDKWGAMRGGGEVDNLKWIVANTKSCPKCSKPIEKNGGCNHVTCTCGQHLCYACGAATGTLYMHICNRYKEEGEVEMTAGGRQRLRFMHYYERFEIHTESYKEEQGKLGPAIDALARRLEADATLPWSGTRDARWPSAAHRRLLRCRQVLPRSYVLAYYMFGGGAAXXRREREEAAAQNRFEDLQGQLEHHVEVLSRTLAAAARPADAAEVVKAKRDADNLARVVEGLCAGMYRCVQDELLPLLVEPMNIAAYHPDGPAMAKEFPPATSVTGGDRRRHATX

SEQ ID NO: 12243 - protein, 315 aa, Hordeum vulgare subsp. spontaneum
MATAGKVIKCKAAVAWEAGKPLSIEEVQVAPPQAMEVRVKILYTALCHTDVYFWEAKGQTPVFPRILGHEAGGIVESVGEGVTELVPGDHVLPVFTGECKDCAHCKSEESNLCDLLRINVDRGVMIGDGQSRFTINGKPIFHFVGTSTFSEYTVIHVGCLAKINPEAPLDKVCVLSCGISTGLGATLNVAKPKKGSTVAIFGLGAVGLAAMEGARMAGASRIIGVDLNPAKYEQAKKFGCTDFVNPKDHTKPVQEVLVEMTNGGVDRAVECTGHIDAMIAAFECVHDGWGVAVLVGVPHKEAVFKTHPMNFLNEK

SEQ ID NO: 12244 - protein, 434 aa, Brassica insularis subsp. insularis
SYTLLFFVILFLFPHVFSTNTLSPNEALTISSNKTLVSPGDVFELGFFKTTTRNSPDGTDRWYLGIWYKTTSGHRTYVWVANRDNALHNSMGTLKISHASLVLLDHSNTPVWSTNFTGVAHLPVTAELLANGNFVLRDSKTNDLDRFMWQSFDYPEDTLLQEMKLGRNLIGSENEKILTSWKSPTDPSSGDYSFILETEGFLHEFYLLKNEFKVYRTGPWNGVRFNGIPKMQNWSYIDNSFIDNNEEVAYSFQVNNNHNIHTRLRMSSTGYLQVITWTKTVPQPNKFWSFPEDTCDLHKVCGPYAYCDMHTSPTCNCIKGFVPKNAGRWDLRDMSGGCVRSSKLSCGEGDGFLRMSQMKLPETSEAVVDKRIGLKECREKCVRDCNCTGYANMDIMNGGSGCVMWTEELDDMRKYDAGGQDLYVKVAAASLVPS

SEQ ID NO: 12245 - protein, 144 aa, Solanum tuberosum
TSTEGVSGTILFTQDGDAPTTVNGNISGLKPGLHGFHVHALGDTTNGCMSTGPHYNPAGKEHGAPEDEVRHAGDLGNITVGEDGTASFTITDKQIPLTGSQSIIGRAVVVHADPDDLGKGGHELSKSTGNAGGRIACGIIGLQG

SEQ ID NO: 12246 - protein, 820 aa, Oryza sativa
  unsure (1)..(820): unsure at all Xaa locations
MKLRFAEAADDDDGGDGGAGDYQGWGRIMTQADQAVISLRPGGGGGXXGGPRAGRLFPFGASTGSLDFLRPRGGASSGFAAKLGDLRFEPLERVRYTRDQLVELHEIIDIPENILKLKQDIDIELHGEDEPWINNDSSVQTQSYNRYAETDNRDWRSRIEQPVQSGEEKSWDKFREAKESYISSGNQFNNQDKLSSQFSAKAQVGPAPALVKAEVPWSIQRGNLSNKERVLKTVKGILNKLTPEKFDLLKGQLIEAGITTADILKDVISLIFEKAVLEPTFCPMYAQLCFDLNEKLPSFPSEEPGGKEITFKRVLLNNCQEAFEGADNLRSEVNKLTGLDQEMERRDKERLVKLRTLGNIRLVGELLKQKMVPEKIVHHIVQELLGSESNRCPAEENVEAICQFFNTIXVDCKHKNWXRTGTGGGGPLSPGAFSMNQPGIVGMLPGMPGARKMPGMPGLGSDDWEVPHSRSKPRADPVRNLTPSLANKPSPNNSRLLPQGSAALISGKTSALVGSGGPLSHGLVVTPSRPPKSLIPAPSVDPIVEQPAAAPKPSSTELQKKTISLLKEYFHILLLHEAQQCIEELKSPDYYPEVVKEAINLALDKGTNSIDPLLRLLEHLYNKNVFKATDLETGCLLYSSLLDELAIDLPKAPVHFGEVIGRLVLSHCLSIEVVEDTLKKIEDSFFRAAVFEAMMKIMKANPSGPYLCAAFSKSVASDPPALSMRLVAGWLLCACAGDGALCPACDTWLHPWLAGHFLIARSRRLPQCHAVLAPGADAAALRPPLGSLAASPLLASTFPLVRRLRSSRQQPHRRWGLGSG

SEQ ID NO: 12247 - protein, 343 aa, Astragalus sinicus
MGCNKQLYYISLALLMCLGLWAVQVTSRTLQDASMYERHQQWMGQYAKIYNDHQEWEKRFQIFKENVNYIETSNKEGGRFYKLGVNQFVDLTNEEFIAPRNRFKGHMCSSIIRTNTYKYENVTTVPSNVDWRQKGAVTPVKDQGQCGCCWAFSAVAATEGIHQLSTGKLISLSEQELVDCDTKGVDQGCEGGLMDDAFKFIIQNHGLDTEAKYPYQGVDGTCNANEASINAATITSYEDVPTNNEQALQKAVANQPISVAIDASGSDFQFYTSGVFTGSCGTELDHGVTAVGYGVSDDGTKYWLVKNSWGTSWGEEGYIRMQRGVDAVEGLCGIAMQASYPIA

SEQ ID NO: 12248 - protein, 305 aa, Saccharopolyspora erythraea
SVKQKSALQDLVDFAKWHVWTRVRPSSRARLAYALFADDHEATTEGAYINLGYWKPGCAGLEEANQELANQLAEAAGISEGDEVLDVGFGLGAQDFFWLETRKPARIVGVDLTPSHVRIASERAERENVQDRLQFKEGSATDLPFGAETFDRVTSLESALHYEPRTDFFKGAFEVLKPGGVLAIGDIIPLDLREPGSDGPPKLAPQRSGSLSGGIPVENWVPRETYAKQLREAGFVDVEVKSVRDNVMEPWLDYWLRKLQDESFKKSVSRLFYSQVKRSLTSDSGMKGELPALDFVIASARKPGA

SEQ ID NO: 12249 - protein, 224 aa, Pyrococcus abyssi
MSTFGAFLTLALYAFYSYLYSRKKNPFLNPVLLSIVSIGIILKILGISYEDYMRSARVISFFLGPAVVSLAIPLYKQIRIVKEYSKEITAGVIVGGLTAIFSAVFILKAFHAPEVLQRSFAPKSVTTAIAMGVSEKIGGIPQLTAVLVILTGILGNAFAPELLNMFKVRDRVARGLATGVSSHGLGTARIITEDELAGAISGLGMALNGVFTAFLLPALIEVIV

SEQ ID NO: 12250 - protein, 695 aa, Clostridium tetani E88
MNKKKITIITAVALTCALSFSVLASYPNEDKALSKGGVGKVFALASLNENNIKFPDKNLDIAIREATNKEPDATLTKNDFKMVTKLNLKSKNIKDISGLEFFENLQSLDLSNNEIKDLGSLSGLKYLKELTLYKNKITDVKALDGLKNLEKLNLRDNKVKNIEGLKGLEKLRELDLGKNSVFQPKPLKDLKNLRILNLESNGIGNAEDLEELKQVEHLILSNNTVDDVEPLLTLTNVNKLYLDDNPVTHIGKLKDMTNLKRLNINNDSIEDLAELKKFKNLQWLKFKNQEMVLDNKKLNDLLVDPNKEVKFADKNLEFAIRDKIEKPKGAIKKADLQRVTQLDLWDKNVTNLAGIENLIDLRVLNAGKNNISNLEPLKSMDNLENLYLTKTKVVSLEPLRGLTNLKALVINETNVSDLTPIKNLINLERLTLGDNKLVSLAGIENLVNLESLDINKNNVSNLASIRDLTNLKSLNINENNVTDLSVVTNLKNLERISLNKNGVTSLGALAALPELEWVTAKENGLTSTVGLQNALKLKELFLDSNQISDLSSLANLTSLETLSLRTNNISDVSSLSDLTRMKNLYLHKNNIGSIAPLASMENLTRLYVGKNNISDISAVANMKNLKTLSIGENMVSNIGPVSGLQSLETLDVADNFITDASPAIGLPNLKDIMLLNTKVPEAQINAFPDSVTVTK

SEQ ID NO: 12251 - protein, 422 aa, Zea mays
  unsure (1)..(422): unsure at all Xaa locations
MAAAAAAAAFDAYTDKNAIFRRLKAKPENKMCFDCNAKNPTWASVTYGIFLCLDCSAVHRSLGVHITFVRSTNLDSWTPDQLKMMAFGGNNRAHAFFKQHGWTDGGKVEAKYTSRAAELYRQMLNKEVAKSAITDNALPSSPVTASEASKPSDDFPEFKLSDAPAPPAENLNGKHEPKSPKAAPRSPKAATHPTFATSVKKPIGAKKVGGKTGGLGVRKLTTKPNESLYEQKPEEPKPAIPALTAPTAKGGPSLHSRFEYVDNEQSSVSRTGGSGSRVTGHVAPPKSSDFFQEYGMGNGFQKKSSNASKAQIEETDEARKKXFSNAKAISSSQFFGTQNREEKEAQLSLQKFAGSSSISSSDLFGRTNVDDSNLDLSAADLINRISFQASQDLSSLKDIAGETGKKLTSFASNFISDLDRIL

SEQ ID NO: 12252 - protein, 156 aa, Zea mays; identical to SEQ ID NO: 4434

SEQ ID NO: 12253 - protein, 430 aa, Brassica rapa
DNSYTFSFLFVFFVLILFRPAFSINTLSSTESLTISSNRTLVSRGNVFELGFFRTNSSSRWYLGIWYKKVSDRTYVWVANRDNPLSSSIGTLKISNMNLVLLDHSNKSVWSTNRTRGNERSSPVVAELLANGNFVMRDYNNNGASGFLWQSFDYPTDTLLPEMKLGYDLKTGLNRFLTSWKSSDDPSSGDFLYKLQNRRLPEFYLSSGVFRLYRSGPWNGIGFSGIPEDEKLSYMVYNFTENSEEVAYTFRMTNNSIYSRLTLSSKGDFQRLTWDPSLEIWNMFWSSPVDPQCDSYIMCGAYAYCDVNTSPVCNCIQGFNPRNIQRWDQRVWAGGCVRRTQLSCNGDGFTRMKNMKLPETTMAIVDRSIGEKECEKRCLSDCNCTAFANADIRNGGTGCVIWTGRLDDMRNYVADHGQDLYVRLAAADLV

SEQ ID NO: 12254 - protein, 168 aa, Oryza sativa
  unsure (1)..(168): unsure at all Xaa locations
PTRPFTYGIEHVYTXTVKYLKEDLHRYQPQCIVSVPLGYEILYSSIHRQISSSSTARKFVALALIKISLLYMEAXRIYEGTVLSNIPVXPSFIVYVVNWLSARLVAALLWPLHNLAXTLVYKKIHSAIGISKAGISGGGSLPMHVDIFFEAIGVKVQNGYGLTETSPV

SEQ ID NO: 12255 - protein, 283 aa, Enterococcus faecalis V583
MTIQWFPGHMAKARREVSEKIKYVDIVFELVDARLPLSSRNPMMDQIVQQKPRLVLLNKGDLADNDQNKKWQHYFQKKGYQTLVINAQQNKGINKIVPAAKEALKEKLAREQAKGLKPRAIRAMCIGIPNVGKSTLMNRLVGKKIAQTGNKPGVTKGQQWLRSGSQLELLDTPGILWPKFEDEEIGKKLALTGAIKDQLLHLDDLAIYGLEFFARFYPQRLTERYGLTEEELFLPAPEQLMLISQKRGFRDDYNRASEMIILEIRSGKLGTYTLDRWEELGDE

SEQ ID NO: 12256 - protein, 357 aa, Xanthomonas campestris pv. campestris str. ATCC 33913
MSKQILILPGDGIGPEIMAEAVKVLTRIDTQHTLGVTLVYDELGGAAYDKYGSPLADETLERARAADAVLLGAVGGPQWDTIDPALRPERGLLKIRSQLGLFANLRPALLYPQLADASTLKPEVVSGLDLLILRELTGGIYFGQPRGTRTLDNGERQAYDTLPYSESEIRRIAKAGFEMARLRGKKLCSVDKANVLASSQLWRAVVEEVAKDYPDIALSHMYVDNAAMQLVRAPKQFDVIVTDNMFGDILSDQASMLTGSIGMLPSASLDANSKGMYEPCHGSAPDIAGQGIANPLATILSVAMMLRYTFAQAAAADAIEAAVGKVLDQGLRTADIWSEGTTKVGTAAMGDAVVAAL

SEQ ID NO: 12257 - protein, 117 aa, Leavenworthia crassa
GMIHDGESRFSINGKPIHHFLGTSTFSEYTVVHSGQVAKINPEAPLDKVCIVSCGLSTGLGATLNVAKPKKGQSVAVFGLGAVGLAAAEGARIAGASRIIGVDLNSNRFEEAKKFGV

SEQ ID NO: 12258 - protein, 490 aa, Helianthus tuberosus
MDFLIIVSTLLLSYILIWVLGVGKPKNLPPGPTRLPIIGNLHLLGALPHQSLAKLAKIHGPIMSLQLGQITTLVISSATAAEEVLKKQDLAFSTRNVPDAVRAYNHERHSISFLHVCTEWRTLRRIVSSNIFSNSSLEAKQHLRSKKVEELIAYCRKAALSNENVHIGRAAFRTSLNLLSNTIFSKDLTDPYEDSGKEFREVITNIMVDSAKTNLVDVFPVLKKIDPQGIKRGMARHFSKVLGIFDQLIEERMRTGRFEQGDVLDVCLKMMQDNPNEFNHTNIKALFLDLFVAGTDTTSITIEWAMTELLRKPHIMSKAKEELEKVIGKGSIVKEDDVLRLPYLSCIVKEVLRLHPPSPLLLPRKVVTQVELSGYTIPAGTLVFVNAWAIGRDPTVWDDSLEFKPQRFLESRLDVRGHDFDLIPFGAGRRICPGIPLATRMVPIMLGSLLNNFDWKIDTKVPYDVLDMTEKNGTTISKAKPLCVVPIPLN

SEQ ID NO: 12259 - protein, 823 aa, Aquifex aeolicus VF5
MEFLRDFGKTALIHQGNEISYAELLENIASFANLMDITPNERVGIVMENRPEWVYAFYGTWKKGGIVVPIDFMSTPQEIRYILEDAEPSIIFCSDETYPRVREASEDLKVEIVNVDNLVLPTPWEGIVRRDEDDVAVLPYTSGTTGNPKGVMLTFKNLMSNIRGVSEVGIAGKEDKTLAILPFHHMYPLMTTMLLPLYLGATVVFLDKLTPEDIIEKLQKYQITVLIGVPRLYQLFHRRIMEEINKNVLAKNLFKLMKKVKNQKIRKTVFKKVHDAFGGRIKYMVSGGAKLPLDIAQDLTTLGFTVIEGYGLTETSPIVSFNPPNRIKLGSVGVPIKGVEVMTTSEGEIIVRGDNVMKGYWKKPEETQKVIINGWFYTGDLGEIDEEGYIYITGRKKEIIVLGSGKNVFPEEIESKILAKAPYIKEVGVFEKDGKLLALIYPDFEKVKELGITNLEETIKWEVIDKVNRELPEWKRVVGFKIVKTELPKTRLGKLRRFLLPQIYEKAEEIKEEKTEDYSVFETEEGRIIKEFLEKISQKEVKPGDHLEIDLGLDSLAKVELLGFIETNFGVSLSEEELSKNLVVKDLIELVRSKKKSVDTKEVSWKDILTKAKPYELYHYPLIFELGRKLLKLYFKLYHRIDVRGLENLPKPPFIIAPNHQSYLDAFAIAAVLPKEIAHETYFLGDETYFRNPITSTFGKLAHVITVNVNKGLKESLQKTAYALMSGKVVVIFPEGARTRTEELMEFKKGVAILARELGVPIVPVAIEGAYEAWSVYDKFPKPKKIKIMFGKPVDPDEKSYEEITKELYEWIKSMLEFLKKES

SEQ ID NO: 12260 - protein, 221 aa, Leymus cinereus
GRRRVEMEDRHVAKLALGGDPEVALFAVFDGHGGKNAAEFAAQNMPKFMAEEVRKVDGGDSDEIEGAVKKCYLKTDEEFLKREESGGACCVTALLQKGGLTVSNTGDCRAVLSRSGTAATLTSDHRASREDERERIENLGGFVVNNRGTWRVQGSLAVSRGIGDAHLKQWVVADPDTRTLLVDPQCEFLVLASDGLWDKVDNQEAIDIARPLCIGNDKASR

SEQ ID NO: 12261 - protein, 327 aa, Novosphingobium aromaticivorans
MMALKTRITQMLGIEHPIVQGGMMNVGYAELASAVSNAGGLGIITALTQPTPEALRDEIERTKAMTSKPFGVNMTIFPTVNSPDYKAYAQAIIDGGVKIVETAGTQAVREIWEMLKPHGVTILHKCTAVRHALSAERAGCDIISIDGFECAGHPGEDDIPGLILIPAAADKVKIPLLASGGFGDGRGLVAALALGAEGINMGTRFCATVEAPIHENVKQAYIDNDERGSFLIFRNFKNTARVGRSAVSEEVVRRLSKPDAVFEDVRELVAGTAGKELLQTGDLSRGVFWAGMVQGLIHDIPTCQQLIERIVADAEDIIRGRLGGFLA

SEQ ID NO: 12262 - protein, 184 aa, Pseudomonas aeruginosa UCBPP-PA14
MKPRVLLSALALAGLPLSGWAADCPELLQGQLTKLRSKESIDLCQRYAGKPLVVVNTASHCGFTPQFKGLEALYQRYKGQGLEVLGVPSDDFKQEAADTAETAKICYGNYGVTFAMTQPQHVRGDEAIPLFRQLAEQSGQAPRWNFYKYVVDRQGRVVAQFSSKTTPDDPQLQAAIEKAIASQP

SEQ ID NO: 12263 - protein, 295 aa, Ralstonia metallidurans
MQRLRSDAQGRANHCHALPALHQPYRFQLEFQRVLRPLCLACHHISPCFSLTSARDSFCGGKLTHGQAPHCGSDLSRCKVSMGTLELFEETAEQHRLGPAAVVLRGFALPYVPDLMPAIAGIETTSPFRHMVTPGGFTMSVALTNCGALGWTTDRRGYRYTTVDPDTGKPWPVMPEVFFRLANEAAAEAGFDDFEPDACLLNRYLPGSRLALHQDKNEQAYETPIVSVSLGMRATFLFGGHARTAPTIKVPLHHGDVVVWGGADRLRYHGVMPIKDAPHALLGSQRINFTFRKAA

SEQ ID NO: 12264 - protein, 173 aa, Helicobacter pylori
MNLDQLEVSHDADSLCVVIEISKHSNIKYELDKESGALMVDRVLYGAQNYPANYGFVPNTLGSDGDPVDALVLSDVAFQAGSVVKVRLVGVLNMEDESGMDEKLLALPIDKIDPTHSYVKDIDDLSKHTLDKIKHFFETYKDLEPNKWVKVKGFENKESAIKVLEKAIKAYQG

SEQ ID NO: 12265 - protein, 101 aa, Triticum aestivum
  unsure (1)..(101): unsure at all Xaa locations
MGYFGSHGVXTLRKYKYXGVEHXIXXKYILXPFWSRLXNVFPXWXPPNXITLTGFMFXXTXGFLGFXXXXNXXTXPPRWVYSCTWEXFFXLLXTFXAGDKN

SEQ ID NO: 12266 - protein, 171 aa, Triticum aestivum
  unsure (1)..(171): unsure at all Xaa locations
MAETEYRCFVGGLAWATDDNNLQQAFSQYGEILDAKIINDRETGRSRGFGFVTFGSEESMRQAIEEMNGKELDGRNITVNEAQSRRSGGGGGGGGYGGQRGGGGGYGGGGGGYGGQGGGGFGQGGGGGYGSGXGGGYRGHRGGGRWLPMTVAVASRWSALVATPGCPLEVL

SEQ ID NO: 12267 - protein, 257 aa, Zea mays
GPSGSGRAGTDNQTDSQTPSSLLGPWLPLLPCLQPFTDLPLPNRTVTSRRPGAVVLRLIAARRWWRAADRIEQRMDGGGGLGGLRWTAEEASTIGGIATVSLLHSFIPTHWLPFSIVARAQRWPLSRTLLVTAFGGVLHVVSTALLGITAVTMANTIAGEETVHKLASLLLIFLGASYILLFALGKGGHSHAHNHPMEKMAVAGLVLVPALSPCATTLPVFLAVGNSSSMMILAIIVLLFSTITVMTSLVALSFYGA

SEQ ID NO: 12268 - protein, 524 aa, Candida tropicalis
MATQEIIDSALPYLTKWYTVITLAALVFLISSNIKNYVKAKKLKCRDPPYFKGAGWTGISPLIEIIKVKGNGRLARFWPIKTFDDYPNHTFYMSIIGALKIVLTVIQENIKAVLATQFTDFSLGTRHAHFYPLLGDGIFTLDGEGWKHSRAMLRPQFARDQIGHVKALEPHIQILAKQIKLNKGKTFDIQELFFRFTVDTATEFLFGESVHSLYDEKLGIPTPNEIPGRDNFATAFNTSQHYLATRTYSQTFYFLTNPKEFRDCNAKVHYLAKYFVNKALNFTPEEIEEKSKSGYVFLYELVKQTRDPKVLQDQLLNIMVAGRDTTAGLLSFAMFELARHPEIWSKLREEIEVNFGVGEESRVEEITFESLKRCEYLKAILNETLRMYPSVPVNSRTATRDTTLPRGGGPNGTDPIFIPKGSTVAYIVYKTHRLEEYYGKDADDFRPERWFEPSTKKLGWAYVPFNGGPRICLGQQFALTEASYVITRLVQMFETVSSPPDVEYPPPKCIHLTMSHDDGVFVKM

SEQ ID NO: 12269 - protein, 333 aa, Clostridium magnum
MKTMTYMEALREAMRIKMKEDEKVLILGEDVGAFGGCFGLTAGLFDEFGDKRVKDTPISEGAIVGCAIGAAATGLKPIAEIMMGDFVTVAMDMLVNQAAKLRYMFGGKISLPMVVRLPGGAGLSAAAQHSQSLEAWLTHVPGIKVVYPSTPADAAGLLLTAIDDDNPVAFIEHKAMYGLKGEVPDDIKPIPFGVADIKPIPFGVADIKREGNDVTIIATGKMVHEALKAAEQLSKDGIEVEVVDPRTLFPLDKETIFNSVNKTGKVVVVTEENKRGGYGGEISAMISEEIFDSLDAPVVRIGALNTPIPFAPNLESYVIPASKDIVNWVKGLF

SEQ ID NO: 12270 - protein, 159 aa, Glycine max
MAASSSEKQVVVIGIDDSEQSTYALNWALDNFFPSPIFKLVLIHSRPTATSAVGFAGPGAAEVLPIVDSDLRKIGARVLETAKQLCINKSVNDVTAEVVEGDPRNVLCDAVDKYRAAMLVVGSHGYGAIKRAVLGSVSDYCAHHAHCTVMIVKKPKIKH

SEQ ID NO: 12271 - protein, 391 aa, Chloranthus spicatus
PYEVPMTAAGALQSYKLAAKAIARLQSLPGGSMEKLCDTVVQEVFELTGYDRAMAYKFHEDDHGEVISETTKPGLEPYLGLHYPATDIPQAARFLFMKNKVRMICDCHAKPVKVFKMKKLAFDLTLCGSTLRAPHSCHSQYMVNMNSIASLVMAVVVNEGEEGDSSEPGQQQLQQKKKRLWGLVICHNTTPRFVPFPLRYACEFLMQVFAIHVNKELELENQIQEKNIFRTQTLLCDMLMRDAPLGIVSQNPNIMDLVKCDGAALLYNKKIWRLGLTPSESQIHDISFWLSENHMDSTGFSTDSLNDAGYPGAVAIGNAVCGMAAVWITSKDMLFWFRSHTAAEVRWGGAKHDPEDKDDNRRMHPRSSFMAFLEVVKTRSLPWKDAEMDAI

SEQ ID NO: 12272 - protein, 373 aa, Oryza sativa
MDHRLLLLGLLLLSPAVAAASVPGEEEPLIRQVVGGGDDNELELNAERHFASFVQRFGKSYRDADEHAYRLSVFKANLRRARRHQLLDPSAEHGVTKFSDLTPAEFRRAYLGLRTSRRAFLRGLGGSAHEAPVLPTDGLPDDFDWRDHGAVGPVKNQGSCGSCWSFSASGALEGANYLATGKMDVLSEQQMVDCDHECDSSEPDSCDAGCNGGLMTNAFSYLLKSGGLESEKDYPYTGRDGTCKFDKSKIVTSVQNFSVVSVDEDQIAANLVKHGPLAIGINAAYMQTYIGGVSCPYICGRHLDHGVLLVGYGASGFAPIRLKDKAYWIIKNSWGENWGEHGYYKICRGSNVRNKCGVDSMVSTVSAIHTSKE

SEQ ID NO: 12273 - protein, 739 aa, Streptococcus pneumoniae
MFASKSERKVHYSIRKFSIGVASVVVASLVMGSVVHATENEGITQVATSYNKANESQTEHRKAAKQVDEDIKKMLSEIQEYIKKMLSEIQLDKRKHTQNVNLNRKLSAIQTKYLYELRVLKEKSKKEELTSKTKKELDAAFEKFKKEPELTKKLAEAKQKAKAQKEEDFRNYPTNTYKTLELEIAEFDVKVKEAELELVKEEAKPRNEEKIKQAKAKVESKKAEATRLEEIKTERKKAEEEAKRKAEESEKKAAEAKQKVDTKEQGKPKRRAKRGVSGELATPDKKENDAKSSDSSVGEETLPSPSLNMANESQTEHRKDVDEYIKKMLSEIQLDRRKHTQNVNLNIKLSAIKTKYLYELSVLKENSKKEELTSKTKAELTAAFEQFKKDTLKPEKKVAEAEKKVEEAKKKAKDQKEEDRRNYPTNTYKTLELEIAESDVKVKKAELELVKEEANESRNEEKIKQAKEKVESKKAEATRLEKIKTDRKKAEEEAKRKAEESEKKAAEAKQKVDAEEYALEAKIAELEYEVQRLEKELKEIDESDSEDYLKEGLRAPLQSKLDTKKAKLSKLEELSDKIDELDAEIAKLEVQLKDAEGNNNVEAYFKEGLEKTTAEKKAELEKAEADLKKAVDEPETPAPAPQPAPAPEKPAEKPAPAPAPEKPAPAPEKPAEKPAEKPAEEPAEKPAPAPEKPAPTPEKPAPTPETPKTGWKQENGMWYFYNTDGSMATGWLQNNGSWY

SEQ ID NO: 12274 - protein, 855 aa, Rhizobium leguminosarum
MSGTHEPVDLTNCDREPIHQLGSVQPFGFLLAVSSDWIVIRASANLAEFLGVTEANALGRPVISLISPEALHAIRNKLTTLRGSDVVERIFGIALTPDQNSFDLAVHLNEGQVIIEGERCQEDRHDAASLSMRSMMSRLDHTETLEAFFREGARQARALTGFDRVMVYRFDESGSGEVVAEAARAGIGSFLGLHYPASDIPVQARALYLRNLFRIIADVDAVPVPILPPLDEHGQPLDLSMSVLRSVSPIHIEYLKNMGVGASLSISIVVDGKLWGLFACHHYGPRLPSAQSRSTAELFGQMFASRLESRERRLALDYETKARRIADRLLTSVADNASLLDDPAWLIEALADAIPADGIGVWINGRLALAGIGPDERSFAALVRHLNRNAAGRIYAVDRLAETYPDLEVDDAVAGMLAIPISRSPRDYVVLFRQELVRTVRWGGDPHKPVEYGPNGPRLTPRKSFEAWSELVRGRSLPFTEAERRVAETIRVTLIEVVLRLTDEVSMARQTANERQELLIAELNHRVRNILSLITGIIRQSQATSVSLGDYIRQLEGRIQSLARAHDQITRDHWAPASLRQLLLAETAAYLGKNAQRIQMGGEDVLLEPQAFSTAALVFHELMTNSAKYGSLSGTGSGTVQLRWHRDDEGNLRIGWREKDGPPVVEPKRHGFGSTIIRRSIPYDLGGKAEVRYVEDGLEADFSIPARHVVGPTSERSNPLPVGATGRKTIPDDQPLSGLNVLLVENNLIIAMDGEDILRRLGADVATAPSVTEAMEILAGQSFDLALLDVNLGDETSFGIADRLAADGVPFVFATGYGEGIAQANSHSDAPVLQKPYTMEGVTDILARVPLPRRE

SEQ ID NO: 12275 - protein, 480 aa, Glycine max
  unsure (1)..(480): unsure at all Xaa locations
MEGGRRITVSPRPCCGRRIVAAKKRPRANDGFVNSVKKLQRREISSKRDRAFTMSDAQERFRNIRLQEEYDTHDPKGPSSMVLPFLRKRSKIIEIVAARDIVLALAQSGVCAAFSRETNERICFLNVXPDEVIRSLFYNKNNDSLITVSVYASDNYSSLKCRSTRIEYIRRVKPDAGFALFESESLKWPGFVEFDDVNGKVLTYSAQDSIYKVFDLKNYSMLYSISDKNVQEIKISPGIMLLIFTKSSSHVPLKILSIEDGTVLKSFNHLLHRNKKVDFIEQFNEKLLVKQENENLQILDVRTSELTEVSRSEFMTPSAFIFLYENQLFLTFRNRTVAVWNFRGELVTSFEDHLLWHPDCNTNNIYITSDQDLIISYCKADSDDSLSEGNAGSINVSNILTGKCLAKIRASNGLPMVKECSCSDDNCSSSACNSGKRKRSSRIRSTVAEALEDITALFYDEERNEIYTGNRLGLVHVWSN

SEQ ID NO: 12276 - protein, 252 aa, Sulfolobus solfataricus
MRKFCDLSGRIAIVTGGASGIGRAIAFKLASLGATVVLGDVKLEELKNVVNEITQQTSSKVLPLYVNVGDFNSAKEFYQKATEILGIDYVDILVNNAGINRDALFVKMTFEQWDEVMKVDLYSMFNMTKQVVDGMIRRNYGRIINMSSMSWLGNIGQANYSAAKAGVIGFTKTLARELAKYNITVNAITPGFIDTPMTRAVPEKVRQKIIERIPMGRVGSPEEVANLIAFLSSEEASYITGEVIGVTGGLVL

SEQ ID NO: 12277 - protein, 336 aa, Thermoplasma acidophilum
MKAALLEKLNQPLSIVDREIPEPGENEVVIKQDYAGLCYRDILSATGFFPRIQLPIIPGHEIGGTVVKTGSEVRNFHVGDHVASLIYIPCGKCEYCRSGNENLCPYKKSIGEEVQGGFREYVNVPEISLISAPKEVDTRYLPIASCVTGMIYHALFKLAKVKEGQRVLITGAGGGVGSNAVQMAKAFGATVIAETTSESKKEMLEKIGADYIVDGNGKFNEDVKKIGGADIVLECVGIHTFERSLRSLNNGGKMIVIGNIKPDPVNLPLGLIILKGNTIRGSISSTRKDVSDALKMVAENRIKPVIGSEVSIDRINEAMEMMKNKQTEGRVLIKFS

SEQ ID NO: 12278 - protein, 413 aa, Arabidopsis lyrata
SRRSFDFRLSSLHKGKAQGSSFREYSSSRDLLSPVIVQTSRWANLPPELLFDVIKRLEESESNWPARKHVVACASVCRSWRAMCQEIVLGPEICGKLTFPVSLKQPGPRDAMIQCFIKRDKSKLTFHLFLCLSPALLVENGKFLLSAKRTRRTTRTEYIISMDADNISRSSNSYLGKLRSNFLGTKFLVYDTQPPPNTSSSALITDRTSRSRFHSRRVSPKVPSGSYNIAQITYELNVLGTRGPRRMHCIMNSIPTSSLEPGGSVPNQPEKLVPAPYSLDDSFRSNISFSKSSFDHRSLDFSSSRFSEMGISCNDNEEETSFRPLILKNKQPRWHEQLQCWCLNFRGRVTVASVKNFQLVAARPSQPQGTGTAPATAPAHPEQDKVILQFGKVGKDMFTMDYRYPLSAFQAFA

SEQ ID NO: 12279 - protein, 273 aa, Zea mays
FPADREALPHHHHPMLNMMTDLSCGPSSKVKEQVAAAPTGSGDRQGQGRGKIEIKRIENTTNRQVTFCKRRNGLLKKAYELSVLCDAEVALVVFSSRGRLYEYANNSVKSTIERYKKANSDSSNSGTVAEVNAQYYQQESSKLRQMIHSLQNANTRNIVGDSIHTMGLRDLKQMEGKLEKAISKIRARKNELLYAEVDYMQKREMDLQTDNMYLTSKIAESNETGQPAMHMMGVPPPTSEYDHMAPFDSRNFLQVSMPQHYSHQLQPTTLQLG

SEQ ID NO: 12280 - protein, 199 aa, Leavenworthia stylosa
SVGEGVTDLQPGDHVLPIFTGECGHCPHCHSEESNMCELLRINTERGGMILDGESRFSINGKPIHHFLGTSTFSEYTVVHSGQVVKINPKAPLDKVCIVSCGLTTGLGATLNVAKPKKGQSVAVFGLGAVGLGAAEGARIAGASRIIGVDLNSKRFEEAKKFGVTEFVNPKEHNKPVQQVIAEMTNGGVDRSVECTGSV

SEQ ID NO: 12281 - protein, 362 aa, Pichia angusta
MSKNIVLLPGDHVGPEVVAEAVKVLEAVSSAIGVKFNFSKHLIGGASIDAYGVPLSDEALEAAKKADAVLLGAVGGPKWGTGSVRPEQGLLKIRKELNLYANLRPCSFASDALLKLSPLKSEIVKGTDFVVVRELVGGIYFGDRKEDAGDGVASDTESYSVPEVQRITRMAAFLALQSDPPLPLWSLDKANVLASSRLWRKTVEETIKNEFPQLTVQHQLIDSAAMILVKSPTKLNGVIVTNNMFGDIISDEASVIPGSLGLLPSASLASLPDTNKAFGLYEPCHGSAPDLGPGKVNPLATILSAAMMLKLSLDLVDAGRAIEQAVKNVLDAGIMTADLGGSSSTQEVGDAVAQEVAKLLKN

SEQ ID NO: 12282 - protein, 172 aa, Zea mays
  unsure (1)..(172): unsure at all Xaa locations
MNRKPGDWDCRACQHLNFSRRDICQRCSEPRGVADRGGGGGGGDYASFGGRGGSSFGGGFGAAGSDVRPXGDWYCSCGAHNFASRSSCFKCSAYKEEAAVNSGAGGFDGDMSRSRGYGFGSGAAGAGAGAARTXTAPGWKSGDWICTRSGCNEHNFASRMECFRCNAPAGLW

SEQ ID NO: 12283 - protein, 363 aa, Crucihimalaya himalaica
  unsure (1)..(363): unsure at all Xaa locations
IRCKAAVAWEAGKPLVXEEVEVAPPQKHEVRIKILFTSLCHTDVYFWEAKGQTPLFPRIFGHEAGGIVESVGEGVTDLQPGDHVLPIFTGECGDCRHCHSEESNMCDLLRINTERGGMIHDGESRFSIKGKPIHHFLGTSTFSEYTVVHSGQVAKINPDAPLDKVCIVSCGLSTGLGAVLNVAKPKKGQSVAVFGLGAVGLAAAEGARIAGASRIIGVDLNSKRFDEAKKFGVTEFVNPRDHDKPVQQVIAEXTDGGVDRSVECTGSVQAMIQAFECVHDGWGVAVLVGVPSKDDAFKSHPMNFLNERTLKGTFFGNYKPKTDIPGVVEKYMNKELELEKFITHTVPFSXINKAFDYMLKGES

SEQ ID NO: 12284 - protein, 386 aa, Schizosaccharomyces pombe
MQLNRKQLKNLHNYKYSAIDNSLLSKYILKPYWWNQLLKVIPMSMAPNLITLIGLGFVVINILTMLVYKYHYEMDAFPSWVYASWAIGLFLYQSFDAIDGSQARRTGTSSPLGQLFDHGVDAINTSFEVLLTIELLQLDMFSSILTQFASLLYFYISTWEEYHTGTLYLSYFSGPVEGIVMVIGLFALTAIKGDSFWLKLHPTPESWGFVRSFLPYYTYGSCLYNFMAFALLLNVLQSLRNALQAVQKNNGSVIKALSGILPYFLQWMAVFSLYAKYPAFFEHHFLTIFCLNAFIFAYSVGVVIVSHITESPFPYWNVLILPFLVDAVDAYTFGVLKNVQTEYFFCYVGICIGVYGNFVAHVIAMITEEYGIKCLTIPSKPESKKN

SEQ ID NO: 12285 - protein, 468 aa, Actinobacillus pleuropneumoniae serovar 1 str. 4074
MSKGKIGLFSLTALVLSSMIGSGIFSLPQNMAEVAGAEALLSGWLITGIGIIFLGLSFFFLSRIKPELEGGVYTYAREGFGDLVGGLSAWGYWLCTAIGSVGYLVVAFEGLGAFVDSENHTIFGQGNTLAAILGASVIVWAVHYLIARGIREAAYVNLIATIVKTLPLFLFIGLAVWFFSPEQFVQDFSGVKLGTTQLEQVKGTMLITLWVFVGVEGASVLSAHAKKKSDVGLATILGILITLVLYVAITVLSLGILPREVIAEMPNPSMAGLMEQMIGTSGKIIITFCLIVSVLASYMSWTMFSSEIPYQAAKTKVFPKVLNRTNINGTPIAGLWLTNITIQISLLLVLFTGKGYSMLIQLSTTMILVPYFLVGAYLFKVAMKQNEAWYIKLTGAMASVYGLWIVYAAGLDYLLLSVVLYVPGLALFFYSRKQNGENIHLTRFEKSLLAVISVLFIGAVYTLFTNSF

SEQ ID NO: 12286 - protein, 390 aa, Zea mays
MDASKLRELRDFVEACKKNPSLLADPNLSFFRDYLQSLGAKIPAAAPSFESPKRSSMDDIDDDGDDDDDLDMRDPTPERDELDEEIVESDLELEGEIVQSDHDDPPQKMGNPSVEVTEENRDASQEAKGKAMEAISEGKLEDAIEHLTNAIVLNPLSAIMYGTRASVFIKMKKPAAAIRDANAALEINPDSAKGYKTRGMAYAMLGKWEEAAHDLHTASNMDYDEEINAVLKKVEPNAHKIVEHRRKYERLRKEREEKRAQRDRLRQRAEAQAAYDKAKRKEQSSSRSSGGASPRGFPGGMPGGGFPRGMPGGGFPGGGMPGGFPGGVPGNVDMSKILNDPDLMAAFSDPEVMAALQDVMNNPANFAKHQANPKVGPIIAKMMAKFNGSQ

SEQ ID NO: 12287 - protein, 457 aa, Iris hollandica
MVGILVYVALFILSLLLFLTAAAKLHNSKSKIKNQAPSPPSLPVVGHLHLLKKPLHRSISLLSARHGPILLLRFGSRPALAVSSLPLAEECLSGKNDLAFANRAHFPHEAAPLQLLTLGSANYGPHWRMLRRISAVELLSSHRINSFSQLRSEEVHSMISTLFRESSDKELNRVELKSKLFELAMNNMMRMIFGKDLASSEGAGRFREMVKESHSLLGASTRLGDFFPFLGWMDWRARRMVLRLVRRRDEFLQSLIDAHARKMEEVEEKTMIRVLVELQKSNRESNNDEGFMLKPLIIGLLQAGTDTSSDTIEWAMSLLLNNRDKLKKARDEIDARVGKERLLRESDLPNLPYLQCVITETLRLYPAAPLLVPHESAEECTVGGYAVPQGTMLLVNAYAIRVVGIVLGTLIQCFEWERVGEEEVDMTEGSGLTLPRANPLEAICRPRQSMISVLAGL

SEQ ID NO: 12288 - protein, 473 aa, Oryza sativa
  unsure (1)..(473): unsure at all Xaa locations
MSGVVAGRGVTRSRRAGAATDEEKETITESRASFWEMKRCRRYAVSNCRSNHVRDSSSPLSWAVSNKYTAMGLVLGQTKEEGVPDIIGADLGESGFRCKNNKKRKEKKNKNEKAPRPRHRQPPPTSSIRRAAVAAAVLGVDLFKSGGNSSEMASSLSKSDKKKVLDFAAWSFNITTSVGIIMVNKALMATHGFSFATTLTGLHFVTTTLMTIVFRWLGLSQPSHLPLPDLIKFVIFSNLSIVGMNIAKLCMIPASCLLEVVFDHVHYSRDTKLSIMVVLIGVAVCTVTDVSVNAKGLAAAVIAVWSTALQQYYVHFLQRKYSLNSFNLLGHTAPAQAGSLLLVGPFVDFLLTGKRVDHFGFTSIALFFLTLSCVIAIGVNLSQFICIGRFSAVSFQVLGHMKTVLVLSLGFLFFGKEGLNFQVVLGMILAVVGMIWYGNASAKPGGKERRSVLPVRSEKPSGALDEKDGSEKX

SEQ ID NO: 12289 - protein, 163 aa, Zea mays; identical to SEQ ID NO: 3116

SEQ ID NO: 12290 - protein, 495 aa, Catharanthus roseus
FFIFLFFVFLLINGRRKSTRTKTINLPPGPWKLPILGNLHNMMMGSVPHRLLRDLAKKHGDLMLLKLGEFNAIVVSSPRMAKEVLKTHDLSFLNRPIIQAPKILCYDNSDLVFSQYGDSWREMRKIFVLELLSTKRVRSFQPIRQDEGSRLVSLIKESVGKSIDLSEKINSYTTSMVARAAFGKVNDAGVTFLKLVKEASEVAGGFDPADIFPSYKFLNVFFNSRSKLLKIHGKTDMILEEMIDEHIKNHEMGKKANGENGKEDVIDILLSIKDSGELQFPFQMNNVKALIFDMFAAGTETSSSTVEWAMSELIRNPDVMAKAQNEVRQVLKGKQIVDESVLQELEYLKLIVKEVLRLHPSSPLLIPRECGEDCQIDGYDIPVKTRVFVNIWAIARDDKYWKDPESFIPERFENTCFDFTGNNFEYLPFGSGRRMCPGMTFGLANVDLVLALLLYHFNWKLPPGVNDIDMTERVGLGATKKHSLVLIPTLYDPSF

SEQ ID NO: 12291 - protein, 472 aa, Pseudomonas aeruginosa PAO1
MADSDKGKLGLPALTALVVGGIIGSGIFSLPQNMAEGAGAGAILIAWAITFVGMLTLTRIFQWLSTTRPELDDGVYGYAREGFGEYLGFNAAWGYWISAWVGNAGYLVVLFSALGSFGALAFFGDGTTWPALLGELTVLWLMHAFVLHGVHNAAITNAIVTLAKVVPIALFILCVALAFRIETFHLDFWGSPALGSVTRQVETTMLYTVWVFLGIESATVYASHARHAADVSRATLLGFVVTLLLLVCVSVLSLGVVPQHELAQMKNPSMAQVMAAAVGPWGATLINVGLIVSVGGALLAWTMLAVEMLYLASRGPTHTAPALFGRTNAVETPAPALWLTSTLISALLLVAFLNASGYNALIQLATSMALIPYLLCAGFCLKLVARRPHSGAMLALALLGTLYGVWLIYAAGLKYLLLSMILYAPGLGFFLHARRQRGLPAFGNRAEGSVAALVLVLALAALWMIGSGRLTL

SEQ ID NO: 12292 - protein, 246 aa, Burkholderia fungorum
MMSLKGKIAMVTGAATGIGATLAQALASSGAEVIGVDIAWDGAQQAGCVERAQCDVADPMSVKTCVANIEAAHGPVDILINNAALASELAPTPFEHIAPEEWLRVMTINTMAPFLCSQAVAPRMRERKWGRIVNLTSATIFIGMPPMLHYVASKGAVAIMTRGLARELGRDGITVNAIAPGLTMTEGVQRNEAYSDELIAQAIAAQSIPNREQPEDLIAACLYLVSDGAKMMTGQILAVDGGTAFH

SEQ ID NO: 12293 - protein, 751 aa, Geobacillus stearothermophilus
MENQNRQNAAQCPFHGSVTNQSSNRTTNKDWWPNQLNLSILHQHDRKTNPHDEEFNYAEEFQKLDYWALKEDLRKLMTESQDWWPADYGHYGPLFIRMAWHSAGTYRTGDGRGGASTGTQRFAPLNSWPNNANLDKARRLLWPIKKKYGNKISWADLFILAGNVAIESMGGKTIGFGGGRVDVWHPEEDVYWGSEKEWLASERYSGDRELENPLAAVQMGLTYVNPEGPDGKPDPKAAARDIRETFRRMGMNDEETVALIAGGHTFGKAHGAGPATHVGPEPEAAPIEAQGLGWISSYGKGKGSDTITSGIEGAWTPTPTQWDTSYFDMLFGYDWWLTKSPAGAWQWMAVDPDEKDLAPDAEDPSKKVPTMMMTTDLALRFDPEYEKIARRFHQNPEEFAEAFARAWFKLTHRDMGPKTRYLGPEVPKEDFIWQDPIPEVDYELTEAEIEEIKAKILNSGLTVSELVKTAWASASTFRNSDKRGGANGARIRLAPQKDWEVNEPERLAKVLSVYEDIQRELPKKVSIADLIVLGGSAAVEKAARDAGFDVKVPFFPGRGDATQEQTDVESFAVLEPFADGFRNYQKQEYSVPPEELLVDKAQLLGLTAPEMTVLVGGLRVLGANYRDLPHGVFTDRIGVLTNDFFVNLLDMNYEWVPTDSGIYEIRDRKTGEVRWTATRVDLIFGSNSILRSYAEFYAQDDNQEKFVRDFINAWVKVMNADRFDLVKKARESVTALQLNCHNRSMGSTTLQ

SEQ ID NO: 12294 - protein, 231 aa, Zea mays
GREQPRRGRPSDSEAQAEARDKICRAIQYGSKFISNGEPGPAQNVDKSTSLARKVFRLCKFVNDLHALISPPAKGTPLPLILLGKSKNAMLSTFLFLDQIVWAGRTGIYKNKERAEFLGRIAFYCFLGSNTFTAIIELAELQRLSTSMKKLEKELKHQELYKNEQYRMKLHKSNERLLALVKSSLDIVVAVGLLQLAPKKVTPRVTGAFGFASSLIACYQLLPSPPAKQSK

SEQ ID NO: 12295 - protein, 360 aa, Oenococcus oeni MCW
MTMVKAAVIYGPKDIRFEKRNIPDPAPDEVQIEVAFNGICGSDIHEYLEGMDLATMPHPLTHMQAPLIPGHEFSGTISKIGKQVSKLRIGDKVAVEPMIACGKCPECLSGHYNWCEHAIGSDQSAGFLGFSANGGLAEKCNVKSTFAHLLPTDFPLDLGALVEPVSVAAQAVMASRVSPGDDVLIQGAGPIGLFTALIAQISGAHHVIINDMSEERLDLANELGVQYPIRADSQKSLAHAISTITENQGVDVAFDCAGVQPTLTGAIQALKNGGKVTVIALFQHPPVVDVRALLKKGGSLLTSYGYANIFDRVIKIIDTYRSLFKRVITKKIELNELVSEGIESLEKDKKQAKILVRLHS

SEQ ID NO: 12296 - protein, 520 aa, Nitrosomonas europaea ATCC 19718
MIFWRVKSLDAILATAEKKSLHRSLGVWQLTLLGVGAIIGTGIFVLTAEAAQKAGPGMMIAFVIAGFVCAVAALCYSELSSMVPVSGSAYTYSYAVLGELIAWMVGWALILEYSVAAGAVAVGWSGYFVGLLNNASLGFEIPYVLANGPFAGGIINLPAVVICLLVVGLLIIGTRESAMFNAILVAVKIIALTAFIALALPATDMNHFDPFLPLGTSGVVAAAASIFFAYVGFDAVSTAAEETKDPQRNLPIALISSLLLCTLFYLLVSAGVIGAVGAQPLVDAAGEGLAPGSREMAAQCKSLAAAGQQPVVCSHEALAHVLREIGWEKIGNLLGLAAFLALPSVILMMLFGQTRIFFVMSRDGLLPEVLSRIHPRFKTPYIVTLVTGVGVMAAAAFLPVGKLANISNSGTLFAFLVVALTVMILRVRDKNRPRPFRTPMIWLVGPLAIGGCLILFLFLPMDAKLVFPVWTGIGLIFYFLYGYRRSHVLLGIDTPSGGENLIEPIRSLADGSDETEVKVK

SEQ ID NO: 12297 - protein, 473 aa, Saccharomyces cerevisiae
MAKDNSEKLQVQGEEKKSKQPVNFLPQGKWLKPNEIEYEFGGTTGVIGMLIGFPLLMYYMWICAEFYHGKVALPKAGESWMHFIKHLYQLVLENGIPEKYDWTIFLTFWVFQIIFYYTLPGIWTKGQPLSHLKGKQLPYFCNAMWTLYVTTTLVLVLHFTNLFRLYVIIDRFGRIMTCAIISGFAFSIILYLWTLFISHDYHRMTGNHLYDFFMGAPLNPRWGILDLKMFFEVRLPWFTLYFITLGACLKQWETYGYVTPQLGVVMLAHWLYANACAKGEELIVPTWDMAYEKFGFMLIFWNIAGVPYTYCHCTLYLYYHDPSEYHWSTLYNVSLYVVLLCAYYFFDTANAQKNAFRKQMSGDKTVRKTFPFLPYQILKNPKYMVTSNGSYLLIDGWYTLARKIHYTADWTQSLVWALSCGFNSVFPWFFPVFFLVVLIHRAFRDQAKCKRKYGKDWDEYCKHCPYVFIPYVF

SEQ ID NO: 12298 - protein, 368 aa, Neurospora crassa
MATHNIVVFGGDHCGPEVVLEAIKVLKAIETNSPSACKFNLQNHLLGGASIDKHNDPLTDEALNAAKAADAVLLGAIGGPEWGTSSTVRPEQGLLKLRKELGTYGNLRPCNFASESLVDSSPLKAEVCRGTDFIVVRELTGGIYFGDRTEDDGSGYACDTEPYSRAEIVRIARLAGFLALAKNSPAKVWSLDKANVLATSRLWRKTVTDVISKECPQLQLEHQLIDSAAMLLVKNPRALNGVVITSNLFGDIISDEASVIPGSIGLLPSASWGGIPDGKVKCNGIYEPIHGSAPDISGKGIVNPVCTILSVAMMLRYSLNLPKEADAVEAAVKAAIDNGTKTKDLGGNATTSDMGNAVVAELEKILKA

SEQ ID NO: 12299 - protein, 175 aa, Methanosarcina barkeri
MIMNFKGKSPKISETAFIADSADVIGDIEIWDFSSVWFNAVLRGDRNKIKIGSRTSIQDNVVIHADPENGVQIGNDVTVGHGAVLHGCRIENNVLIGMNSTVLNGAEIGKNSIVGANALISEGKKFPENSLIIGVPGKVKREIKKFEIEAIAENAAEYVEFVKEYREEVKKIQKK

SEQ ID NO: 12300 - protein, 347 aa, Prochlorococcus marinus str. MIT 9313
MAGMISMIGKERCLRPPSCRAKGLQLLIERASICAFDDSAVLKILIMGGTRFVGKPLVTRLQAQGHALTLFTRGRHSLPDGVEHLSGDRTTPEGLSRLQGRSFDVIVDSSGRKLEDSQRVVACTGEPKHRFLYVSSAGVYADSEEWPLNEESATDPNSRHAGKAQTESWLLQQGIPFTSFRPTYIYGPGNYNPIERWFFDRIVHNRPVPLPRDGTTITQLGHVVDLADAMVRSLEVETATNRIYNCSSKRGITFRGLIAAAARACGKDPNAVELRSFDPSGLNPKARKAFPLRLSHFLTDITRVERELAWQPRFDLETGLEDSYCNDYSLKPTAEPDFSADQSLIGV

SEQ ID NO: 12301 - protein, 438 aa, Brassica rapa
TSILLVFVVMILFHPAFSIYINSLSSAGSLTISSNRTLVSPGNIFELGFFRTNSSSRWYLGIWYKQLSERTYVWVANRDNPLSNSIGTLKISDMNLLLVDHSNKSVWSTNLTRGNERSSLVVAELLANGNFVMRDSNNNDAGGFLWQSFDYPTDTLLPEMKLGYNLKKGLNRFLTSWRSSEDPSSGEISYKLEMRRLPEFYLWNEDFPMHRSGPWNGIEFSGIPEDQKSSYMAYNFTENSEGVAYTFRMTNNSIYSRLTVSSEGNFERLTWNPLLGMWNVFWSSPVDAQCDMYRTCGPYSYCDVNTSPVCNCIQGFNPSNVQLWDLRDGAGGCIRRTRLSCSGDGFTRMKNMKLPETTMATVDRSFGLKECEKRCLSDCNCTAFANADIRNGGTGCVFWTGRLDDMRNYAADHGQDLYVKVAAADLVKKRNANGKNIS

SEQ ID NO: 12302 - protein, 372 aa, Zea mays; identical to SEQ ID NO: 2425

SEQ ID NO: 12303 - protein, 110 aa, Symbiodinium microadriaticum
FDKDGDGTITTKELGTVMRSLGQNPTEAELQDMINEVDADGNGTIDFPEFLSLMARKMKDTDTEEELIEAFKVFDRDGNGFISAAELRHVMTNLGEKLTDEEVDEMIREA

SEQ ID NO: 12304 - protein, 427 aa, Saccharomyces cerevisiae
MHHNSQSLSSGHIRSPEDENVAPIGNLKHRTGSLSHISSAHPRVALSDVTNIVATNSSNNSISKPKVAPIKERLDSAAIIEEERLDANSVAQRKEADHNDLLTDREQEEPVEDDGESEEDEEEDQEPLLLQHYASDTLVWEHAFRTYYRTTLDPNDDDVYDVVMVAELSNEIFEYMRKLEDLYKPNPYYMDKQPELRWSFRSTLIDWIVQVHEKFQLLPETLYLCINIIDRYLCKEVVPVNKFQLVGAASLFIAAKYEEINCPTIKDFVYMSENCYSRNDLLDAERTILNGLEFELGWPGPMSFLRRISKADDYEHDTRTLAKYLLESTIMDHRLVSAQPSWLAAGAYFLSKIILGQNQWSLAHVYYSNYTQEQILPLATIILENCRYASKRHNAIWRKYSSRRYLHSSQIVAKWIALAEHRVERSN

SEQ ID NO: 12305 - protein, 274 aa, Thermoplasma acidophilum
MRNVLLIHGGVGSDPSFNGRLNGYAETASEELSALDNAVRAVIKMEDDPDFNAGTGSVPRIDGSIQMDAAVMIPGHFGSVINIERVKNPILVARDVMAKSPHIMMTGDGAVKFARLMGYPDYDPMTEKARNLLKKFEEDVEKNEVPDKFKIYFKYVRVHDTVGAVARVEGEFAGAVSTGGSFPMMRGRVGDSPIPGAGIYVGERGAVVATGVGEEIAKNVLSFRIYSRIGTGKLYDIIKEEVDKFSVPVGIIAIDEKDYAYYANKPMAVGIKEF

SEQ ID NO: 12306 - protein, 511 aa, Pelargonium x hortorum
MYNMSLYLLLGSSALAFAAYLVLFSFSKSRRRLPPGPKAWPIVGNLPHMGSMPHQNLAAMARTYGPLVYLRLGFVDVVVALSASMASQFLKTHDSNFSSRPPNAGAKHIAYNYHDLVFAPYGPRWRLFRKITSIHLFSGKALDDYRHVRQEEVGVLASNLARAVSTIVNLGQLLNICATNALGRAVIGKKVFKDGTDDVDPKADEFKSMVVELMVLAGVFNIGDFIPPLDCLDLQGVASKMKNLHKRFDAFLSAILQEHNINSAASATPSMLTTLISLKDSVEDSEGGKLTDTEIKALLLNMFTAGTDTTSSTVEWAIAELIRQPEILIRAQKEIDSVVGRDRLVTELDLSKLPYLQAIVKETFRLHSSTPLSLPRIATQSCEINGYHIPKGATLLVNVWAIARDPDVWADPLSFRPERFLPGSEKENVDVKGNDFELIPFGAGRRICAGMSLGLRMVQLLTATLLHAFNWDLPQGQIPQELNMDEAYGLTLQRASPLHVRPRPRLPSHLY

SEQ ID NO: 12307 - protein, 263 aa, Aeropyrum pernix
MQLASWRLLARTIKNVDVVVEVVDIRDPMVTRSRRAERMAEALDKRLLIVLNKSDLVPLRVAEKWARIIEGMGFDVIYVSARHRLSTRRLRGFIKHLADVKPFSAGVIGFPKTGKSSVINALRGRKGAPTSPIPGSPGYTKGLQLLKIEPGFYMVDTPGVIPVEGGWPESIIRGRSPEDLPDPVPPAAALIEKILRYNRRAFQAAYGITAQDPYEIMERLAVKRGWFYKTTKEPLIEEAARTIIRDYHKAKIPFYVPPEEFTR

SEQ ID NO: 12308 - protein, 542 aa, Coxiella burnetii RSA 493
MLKRSISPFALLLTSVSAILGSGWLFAAYYTSELAGPSAILAWLIGGSAAIIIAFVFAELCAMLPITGSSTRIPYYTHGTLVSFLFAWIIWLTYASFASTEVQAVLQYFSYFFPSLVQSNAGLTGFGYFLATLLMLAISALNVFSLRWLLRCNNVLTLLKIAIPVIVALVILAVYFSPHQLLHPGHSSFMPYGMHGVFAAVSGGGIVFAFNGFKQACEMAGEAKKPARALPFAVIGSVIVCLIVYLLLQFAFLTSIIPSNLIHGWSHLALPGGTSPLTAVAHQGHLDILLPVLYAGAVIGPMAAALMYTSSAARSLYGMSKSHHIPPLFQRLLHGNPVVAIITNFLLGMSLFAPLPGWNSMITFLTSLIALTYGIGPICLLTLRKQLPDYQRPFKLPFVTVWATFAFYLCTLLTYWSGWAVISKLGIALVVGLLVLFIHRAFISPDERVPLNAKAALWVWPYLVGVTLISYLGDYGGGKGVIPPGWDFGVIGLFCIMIMWLALKFRLPTILTQHYMKDGDFTHQPPEQETDGTQEPAFAQHG

SEQ ID NO: 12309 - protein, 818 aa, Agrobacterium tumefaciens
MIDDILDKMTLEEQVSLLSGADFWTTVAIERLGVPKIKVTDGPNGARGGGSLVGGVKSACFPVAIALGATWDPELIERAGVALGGQAKSKGASVLLAPTVNIHRSGLNGRNFECYSEDPALTAACAVAYINGVQSQGVAATIKHFVANESEIERQTMSSDVDERTLREIYLPPFEEAVKKAGVKAVMSSYNKLNGTYTSENPWLLTKVLREEWGFDGVVMSDWFGSHSTAETINAGLDLEMPGPWRDRGEKLVAAVREGKVKAETVRASARRILLLLERVGAFEKAPDLAEHALDLPEDRALIRQLGAEGAVLLKNDGVLPLAKSSFDQIAVIGPNAASARVMGGGSARIAAHYTVSPLEGIRAALSNANSLRHAVGCNNNRLIDVFSGEMTVEYFKGRGFESRPVHVETVEKGEFFWFDLPSGDLDLADFSARMTATFVPQETGEHIFGMTNAGLARLFVDGELVVDGYDGWTKGENFFGTANSEQRRAVTLGAARRYRVVVEYEAPKASLDGINICALRFGVEKPLGDAGIAEAVETARKSDIVLLLVGREGEWDTEGLDLPDMRLPGRQEELIEAVAETNPNVVVVLQTGGPIEMPWLGKVRAVLQMWYPGQELGNALADVLFGDVEPAGRLPQTFPKALTDNSAITDDPSIYPGQDGHVRYAEGIFVGYRHHDTREIEPLFPFGFGLGYTRFTWGAPQLSGTEMGADGLTVTVDVTNIGDRAGSDVVQLYVHSPNARVERPFKELRAFAKLKLAPGATGTAVLKIAPRDLAYFDVEAGRFRADAGKYELIVAASAIDIRASVSIHLPVDHVMEP

SEQ ID NO: 12310 - protein, 262 aa, Saccharomyces cerevisiae
MGFLAREKVHLKKVVIGGSQDWLKHSYKLFKAIMNRIFGYGNKKSHDQLLQESNQSMNQAQQSLSNRISQLDTQIAQLNFQLQNIQKNLQRSNNKQPSLRKQALKILNKRKQLENMKDSLDSQSWSMTQAQLTNDNLQNTMITINALKQTNNAMKAQYGKINIDKLQDMQDEMLDLIEQGDELQEVLAMNNNSGELDDISDAELDAELDALAQEDFTLPTSENSLGNDMPSYLLGANAPPAFIDEEPNLDTEDKNKALESAQ

SEQ ID NO: 12311 - protein, 172 aa, Zea mays
MMMACALAVAQPAASLAPPSGKRTLSGGRPPRLPPPRLSGKLALATPCCARGAGKLIRSRAVVAKAAQDGSESSGTGSIVKYVTSPFSTAKHFSTAEDIFALAGIGFAAVAALWASVNLIEIIDKLPVLPLLFELVGILVAWLFIYNNLLFKPKRKEFLENIKSSGSRILGQ

SEQ ID NO: 12312 - protein, 154 aa, Cordyceps militaris
MVKAVCVLRGDAKVAGTVTFEQESESAPTTITWDITGNDPNAERGFHIHTFGDNTNGCTSAGPHFNPHGKTHGAPTDAARHVGDLGNIKTDGQGNAKGSVQDSHVKLIGPHSVVGRTVVVHGGTDDLGKGGNEESLKTGNAGPRPACGVIGVAN

SEQ ID NO: 12313 - protein, 365 aa, Loeseneriella africana
AVQSQKLAVRAISQLQSLPGGDIKLLCDTAVENVRNLTGYDRVMVYKFHEDEHGEVVAESRRPDLEPYIGLHYPATDIPQASRFLFKQNRVRIIVDCHASPVSVIQDDGLMQPLCLVGSTLRAPHGCHAQYMENMGSIASLAMAVIINGNDEDGMGGRNPTRLWGLVVCHHTSARCIPFPLRYACEFLMQAFGLQLNMELQLAAQLLEKHVLKTQTLLCGMLLRESPTGIVTQSPSIMDLVKCDGAALYYQANYYPLGVTPTEAQIKDIVEWLLAFHGDSTGLSTDSLADAGYPGATSLGDAVCGMAVAYITNKDFLFWFRSHTAKEIKWGGAKHHPEDKDDGQRMHPRSSFKAFLEVVKSRSLP

SEQ ID NO: 12314 - protein, 438 aa, Schizosaccharomyces pombe
MSAESLLHNTFSTEQIEVLENEYAAHNYHPLPVCFSKAKGAKVWDPEGREYLDFLSAYSAVNQGHCHPKIIEALVEQAQRVTLSSRAFYNDKFGPFAKYITEYFGYEMVIPMNTGAEAVETACKLARLWGYKAKKIPTDEAIILSCVDNFHGRTMGIISMSTDPDARDNYGPYLPNVGPKISGADRVLRYNNIEDLKYYLDTFGPKVAAFLVEPIQGEAGVMVPDDGYLEEAYKLCKAHNVLFIADEVQTGVARTGKMLCIEHSNVKPDVVILGKAISGGVYPVSAVLSSREIMLNFEPGTHGSTYGGNPLGAAVSIAALEVVKEEKLTERAAVLGEKFRTALIECKSPIVQKVRGRGLLNAVVIDESKTNGRTAWDLCLIMRSRGVLAKPTHGNIIRFSPPLVITEEDLMKGIEVIKKSLNDLPTIDMTPYAEKPIH

SEQ ID NO: 12315 - protein, 322 aa, Xanthomonas axonopodis pv. citri str. 306
MLYRRLGSTGLQLSALSFGAWVTFGKQIGRSEARNLIAAAWDNGINFFDNAEVYARGRAEQVMGDVIADLRLPRDGFCVSSKVFFGAVDSPRPTQRGLSRKHVTDACHAALKRLHVEYLDLYYCHRPDPDTPIQETVRAMDALIRQGKVLYWGTSEWSAAQLREAIAIAEREHLHAPAMEQPQYNLLHRERLEREYASLCEDGLGTTIWSPLASGLLTGKYNAGVEADSRLGQPGNQWLQDEVLGAPEARRLERARAFCAVAAELGQSPAQLAIAWCLRNPHVSSVILGASRVTQLEENLGALNTLDQVDDAGWARVESSTR

SEQ ID NO: 12316 - protein, 111 aa, Saccharomyces naganishii
SHTIVELIENGYNCVIVDNLCNSSYESVARLEVLCKTHIPFYHVDLCDREPMEGIFKENKIDSVIHFAGLKAVGESTEIPLKYYHNNILGTLVLLEMMQRYDVEKLVFSSS

SEQ ID NO: 12317 - protein, 169 aa, Nicotiana sylvestris
MASQSSKPQSIYDFTVKDAKGNDVDLSIYKGKVLIIVNVASQCGLTNSNYTDLTEIYKKYKDQGLEILAFPCNQFGGQEPGSIEEIQNMVCTRFKAEYPIFDKVDVNGDNAAPLYKFLKSSKGGFFGDSIKWNFSKFLVDKEGNVVDRYSPTTTPASMEKDIKKLLGVA

SEQ ID NO: 12318 - protein, 325 aa, Zea mays
MEASDSGSSVLNASEAASAGGAPAPAEEGSSSTPAALEFSILIRSDSDAAGADEDEDATPSPPPRHRHQHQQQLVTRELFPAGAGPPAPAPRHWAELGFFRADLQQQQAPGPRIVPHPHAAPPPAKKSRRGPRSRSSQYRGVTFYRRTGRWESHIWDCGKQVYLGGFDTAHAAARAYDRAAIKFRGVDADINFNLSDYDDDMKQMKSLSKEEFVHALRRQSTGFSRGSSKYRGVTLHKCGRWEARMGQFLGKKYIYLGLFDSEVEAARAYDKAAIKCNGREAVTNFEPSTYHGELPTEGTYFFLHIYNLQVLLAIKLLGFYCFFC

SEQ ID NO: 12319 - protein, 361 aa, Elaeodendron orientale
QKLAVRAISQLQSLPGGDIKLLCDTVVECVRDLTGYDRVMVYKFHEDEHGEVVAESKRPDLEPYIGLHYPSTDIPQASRFLFKQNRVRIIVDCHASPVCVIQDDGLMQPLCLVGSTLRAPHGCHAQYMENMGSIASLAMAVVINGNDEEVIRGKNLTRLWGLVVCHHTSARCIPFPLRYACEFLMQAVGLQLNMELQLAAQLLEKHVLKTQTLLCDMLLRDSPIGIVTQSPSIMDLVKCDGAALYYQGNYYPLGVTPSEVQIKDIVEWLLAFHGDSTGLSTDSLADAGYPRAALLGDAVCGMAVAYITNRDFLFWFRSHTAKEIKWGGAKHHPEEKDDGQRMHPRSSFKAFLEVVKSRSLP

SEQ ID NO: 12320 - protein, 980 aa, Malus floribunda
MERTMRVVILLTRFLAIATITFSIGLCNGNPGWPPLCKVSERRALLMFKQDLKDPVNRLASWVAEEDSDCCSWTGVVCDHVTGHIHELHLNSSYSDWEFNSFFGGKINPSLLSLKHLNYLDLSNNDFNGTQIPSFFGSMTSLTHLNLAYSELYGIIPHKLGNLSSLRYLNLSSFYGSNLKVENLQWISGLSLLKHLDLSSVNLSKASDWLQVTNMLPSLVELDMSDCELDQIPPLPTPNFTSLVVLDLSRNSFNCLMPRWVFSLKNLVSLHLSFCGFQSPIPSISQNITSLREIDLSFNSISLDPIPKLLFTQKILELSLESNQLTGQLPRSIQNMTGLTTLNLGGNEFNSTIPEWLYSLNNLESLLLFGNALRGEISSSIGNLKSLRHFDLSSNSISGPIPMSLGNLSSLEKLYISENHFNGTFTEVIGQLKMLTDLDISYNSLEGVVSEISFSNLIKLKHFVAKGNSFTLKTSRDWVPPFQLEILKLDSWHLGPEWPMWLRTQTQLKELSLSGTGISSTIPTWFWNLTFHVQYLNLSHNQLYGQIQNIVAGPSSAVDLSSNQFTGALPIVPTSLMWLDLSNSSFSGSVFHFFCDRPDEPKQLGILRLGNNFLTGKVPDCWMSWPSLAFLNLENNNLTGNVPMSMGYLDWLESLHLRNNHLYGELPHSLQNCTSLSVVDLSENGFSGSIPIWIGKSLSGLNVLNLRSNKFEGDIPNEVCYLKSLQILDLAHNKLSGMIPRCFHNLSAMANFSQSFSPTSFWGMVASGLTENAILVTKGMEMEYTKILGFVKGMDLSCNFMYGEIPEELTGLLALQYLNLSNNRFTGRIPSKIGSMAQLESLDFSMNQLDGEIPPSMTILTFLSHLNLSYNNLTGRIPESTQLQSLDQSSFVGNELCGAPLNKNCSENGVIPPPTVEHDGGGGYSLVEDEWFYVSLGVGFFTGFWIVLGSLLVNMPWSILLSQLLNRIVLKMYHVIVEYV

SEQ ID NO: 12321 - protein, 423 aa, Mesorhizobium sp. HN8A1
WGFDGSSTMQAEGRSSDCVLKPVALYPDPARTNGILVMCEVMMPDGVTPHESNSRATILDDEDAWFGFEQEYFFYKDGRPLGFPESGYPAPQGPYYTGVGYKNVGDVARKIVEEHLDQCLAAGINHEGINAEVAKGQWEFQIFGKGSKKAADQIWMARYLLLRLTETYGIDIEFHCKPLGDTDWNGSGMHCNFSTKFMREVGGKAYFEALMAQFDKNLMDHIAVYGPDNDKRLTGKHETAPWNKFSYGVADRGASIRVPHSFVKNDYKGYLEDRRPLGANEQVVEIETVPTGSLGLDIALGVGGLPRGRIIEIYGPESSGKTTLALHTVAEAQKKGGICAFVDAEHALDPVYARKLGVDLENLLISQPDTGEQALEICDTLVRSGAIDVLVVDSVAALTPRAEIEGEMGDSLPGLQARLMSQA

SEQ ID NO: 12322 - protein, 354 aa, Lycopersicon esculentum
MEKSNENVEAFGWAARDTSGVLSPFNFSRRVTGEKDVQFKVMYCGLCHSDLHQIKNEWSNSIYPMVPGHEVVGVVTEVGSKVERFKTGDKVGVGCLVGSCRKCENCDNDLENYCPDQIMTYNGVYTDGTPTYGGYSDIMVTNEHYVVHWPENLRMEAAPLLCAGITTYSPLRHYGLDKPGMHIGVVGLGGLGHMAVKFAKAMGTKVTVISTSASDEAVERLGADSFLVSRDPDKMQGAAGSLDGIIDTVSAIHPLLPLINLLKTHGKLVMVGAPEKPLELPVFPLLLGGKLVAGSAIGGMKETQEMVDFAGKHNITPDIGVVSMDYVNTALERLLKSDVKYRFVLDIGNTLKKN

SEQ ID NO: 12323 - protein, 346 aa, Arabidopsis thaliana
MASNTLKEMNSLHVTEKISDCKASLTKPCVGKMNGKSEDRPLPNSASLDSSDSKVVEAEKPEPEIAIVEVEYIESENLDNVDDADAVLKSVLAGLESKDWISLCDALNNVRRLSIFHKEEMMHMLEKVIPLVVKSLKNPRSAVCKTACMTSADIFSAYNNHITDLLEPLLTQLLLKSSQDKRFVCEAAEKALTAMTKYVSPTLLLPKLQPCLKNRNPRIRAKASLCFSRSVPRLGVEGIKEYGIDKLVQAAASQLSDQLPESREAARTVLLELQSVYEKAHPLINPETSSPEEQQIPEVEPITWETFCKSKLSALSAQAVLRVTNVVTVTAREGLVTTGSSSSSQL

SEQ ID NO: 12324 - protein, 229 aa, Clostridium tetani E88
MRDLTNSPMMSIIISIICFEIGLYINKKTKISLLNPLLICVPLIIFIMFFLNINLKDFNKGGELISFFLAPATVVLAVPLYNKIDLVKKYFIPILLGVTVGCITSIVSVYYLCRLFGLTEGLTYSFLPKSITTPIGIEVSKLIGGIPSITVSAIIITGIIGAIISPIVCKIFNIKDEVAVGISIGTASHAIGTTKAIEMGETEGAMSGLAIGISGLITSFLIPIIIKFL

SEQ ID NO: 12325 - protein, 438 aa, Zea mays
MSFRSMVRDIRESFGNISRRNFEVRIHHRGKSLGSSGDLQDRPAEVQQSRWASLPPELLCDVMKRLEEDDSSWPDRKDVVSCASVCTTWRDMCKDIVRSPEHCAKLTFPVSLKQPGPRDGVIQCFIKRDKSKLTYRLYLSLSSGVLDENGKFLLAAKRSRRMAHTEYAIFMDSRNFSRSSTGYIGKLRSNFLGTKFIIYDTQAPYNGGRVCTQERAPSRRLSSRKVSPRVPSGSYPVAQVNYELNVLGTRGPRRMQCAMHSIPASAVEPGGVVPGQPKELLPRLFDESFRSTATSSFSKYSVADSSMDLGSCPFSEVEVGGGSLREGDESEKERPLVLRNKAPRWHEQLQCWCLNFRGRVTVASVKNFQLIAPAKTQPQPQASGPPPPPPSSSYHDPVILQFGKVGRDMFTMDYRYPLSAFQAFAICLTSFDTKLACE

SEQ ID NO: 12326 - protein, 262 aa, Zea mays
MAATAMIGITNLRCRHDPLSSLPRATSSAARSCTLLPPRCRRHSSCCSPSSSVSPCRARVRPTAALKRIPAADTGFMGPANNEATTLKRSSSADLRRRLIVPSSTAGTGHAASASTGVLPAIIGVAHLLVSLGILLAMDKFLKQAFVAASIKFPSALFGMFCVFSVLVVFDTFVPPLAKAFIGFFEPATLFIQRWLSLFYVPTLVVLPLAVGDIPAASGIKILAITFGGWFATLTVAGYTVLAMRKLVKTELLAPSEPTKKP

SEQ ID NO: 12327 - protein, 480 aa, Oryza sativa
MDGRRFRRIGVRFSASHSIRLSQLHPPVGKDPDSASATAARAPPEPSKAATSSTHEVPIQNSPVKSWQWWLMVGVNMFFLIAGQTASTLLGRFYYNQGGNSKWMSTFVQTAGFPILFIALFLFPSTQTVTSSPAPTISIPKITLIYVVLGLIIAADDLMYSYGLLYLPVSTYSLICASQLAFNAVFSYFLNAQKFTPLIFNSVVLLTFSASLLGVDEDSQGTTSISHGKYILGFLLTLGASATYSLILSLMQVTFEKVIKRETFSVVLNMQIYTALVATLASLVGLFASGEWMTLQGEMHAFQSGKLSYVMTLLWTAISWQVASVGVVGLIFVVSSLFSNVISTLALPIIPVFAVIFFHDKMDGVKIIAMLMAIWGFMSYGHQLYVDGKKVREGRRPGAPGAVEFPCPSSRGSTPPPWTRRRPHRWKRRRAACRIRRSSPPSPASAPTPLTTTSSRHSHTRPTRRPRLLSHCRRWSLSWS

SEQ ID NO: 12328 - protein, 365 aa, Yersinia pestis CO92
MNMTKTYHIAVLPGDGIGPEVMAQASKVLDAVRQRFGLKISTSVYDVGGAAIDRHGSPLPAATVAGCEQADAILFGSVGGPKWEHLPPAEQPERGALLPLRKHFKLFSNLRPARLYQGLEDFCPLRSDIAARGFDILCVRELTGGIYFGQPKGREGQGMHERAFDTEVYHRFEIERIARIAFESARKRRSKVTSIDKANVLQSSILWREVVNGIAADYPDVALSHMYIDNATMQLIKDPSQFDVLLCSNLFGDILSDECAMITGSMGMLPSASLNEQGFGLYEPAGGSAPDIAGKNIANPIAQILSLTLLLRFSLGKDDAADAIERAINQALEQGYRTADLAGDGHAIGTHEMGDIIAKFVVEGV

SEQ ID NO: 12329 - protein, 178 aa, Triticum aestivum
PGSSPPAAPHQTRPRSPSLCFPHRPTPKKQPPFSPPPSGSSPSSPTQPSLEGRNDTQIRTLLDSSPLPAVTTADPVPRALSNDSATQAASPNPVAPSSPSAPTSATTQDAAGRESPSSMFSTSGLSSWAKNLKIPQPSSGQESPPGKNTVSRLASGLGLRLSPKYPQQDESAEGSTTP

SEQ ID NO: 12330 - protein, 1102 aa, Chlorobium tepidum TLS
MSDLDVIRQIEQELGMQLEPVDKLKWYSKGYKLDKDQRVTAIGLYDCGSDTLDRIIQPLESLKSLSELSLSSNQITDISPLASLNSLSMLWLDRNQITDIAPLASLNSLSMLWLFGNKISDIAPLESLKSLTELQLSSNQITDIAPLASLKSLTELSLSGNNISDIAPLESLKSLTELSLSSNQITDIAPLASLKSLTELSLSSNQISDIAPLESLKSLTELQLSRNQISDIAPLESLKSLTELQLSSNQITDIAPLASLKSLTELQLSRNQISDIAPLESLNSLSKLWLNGNQITDIAPLASLNSLTELELSSNQITDIAPLASLKSLSTLWLSSNQISDIAPLASLESLSELSLSSNQISDISPLASLNSLTGFDVRRNPIKRLPETITGFDMEILWNDFSSSGFITFFDNPLESPPPEIVKQGKEAVRQYFQSIEEARSKGEALVHLQEIKVHLIGDGMAGKTSLLKQLIGETFDPKESQTHGLNVVTKQAPNIKGLENDDELKECLFHFWDFGGQEIMHASHQFFMTRSSVYMLLLDSRTDSNKHYWLRHIEKYGGKSPVIVVMNKIDENPSYNIEQKKINERFPAIENRFHRISCKNGDGVESIAKSLKSAVLHPDSIYGTPLAPSWIKVKEKLVEATTAQRYLNRTEVEKICNDSGITDPGERKTLLGYLNNLGIVLYFEALDLSEIYVLDPHWVTIGVYRIINSSKTKNGHLNTSALGYILNEEQIRCDEYDPAKNNKFTYTLLEQRYLLDIMKQFELCYDEGKGLFIIPSNLPTQIDNEPEITEGEPLRFIMKYDYLPSTIIPRLMIAMQHQILDRMQWRYGMVLKSQDHEGALAKVVAETKDSTITIAIQGEPRCKREYLSIIWYEIKKINANFTNLDVKEFIPLPGHPDELVEYKELLGLEKMGRDEYVSGKLEKVFSVSKMLDSVISKEERNKERLMGDINIKLENIGNPTIPIHQQVEVNVSQETVQHVENLQGFFENLKADILREAELEIDDPKERKRLANELELAENAITKMDAAVKSGKNKLKPDVKDRLGEFIDNLANENSRLRKGIALVMNGAEKVQKLARYYNNVAPFFDLPSVPPVLLGKEKT

SEQ ID NO: 12331 - protein, 504 aa, Solanum tuberosum
MSSRGGGIAESPYLRNYRVGKTLGHGSFGKVKIAEHLLTGHKVAIKILNRRKMKTPDMEEKLRREIKICRLFVHPHVIRLYEVIETPTDIYVVMEYVKSGELFDYIVEKGRLQEDEARKIFQQIIAGVEYCHKNMVVHRDLKPENLLLDARRNVKIADFGLGNIMRDGHFLKTSCGSPNYAAPEVVSGKLYAGPEVDVWSCGVILYALLCGTLPFDDENIPNLFKKIKSGVYTLPSHLSPLARDLIPRMLIVDPMKRISVPDIRQHQWFKIHLPRYLAVPPPDARQHLKKLDEEILQQVSRMGLDRDQLLDSLQKRIQDDATVAYYLLYDNRSMASSGYLGAEFQESVDCYSPGLFPNLDLQLSTGNGVSEESLRRPFRKEKMWLVGLQSPANPKEIMNQVLGTLLELNVRWKKIGHYNMKCLWCHDLHLHSMANNHMNDDDHFISNATAISTHLQPQPTVKFEMQLYKTEDEKYLLDLQRISGPQFLFLDFCAGFIRQLEGPQ

SEQ ID NO: 12332 - protein, 243 aa, Triticum aestivum
MATDRVKASVLHGEKDLRLEERELPKPSSNEVQVAVQSTGLCGSDLHYYNHFRNGDIIVREPLTLGHESAGTVVAVGSEVTHLKPGDHVALEVGLPCETCELCDEGRYNICRGMKFRSSAKANPHAQGTLQERINHPAKWCHKMPEHVTLDLGALVEPLSVAMHARDRASLPKGSTVLVLGAGAVGLLAAAVAKADQAKTVIIADILKDRLDFATSNGFADASVVGPMEPQLSRTAGFRSKVA

SEQ ID NO: 12333 - protein, 751 aa, Geobacillus stearothermophilus
MENQNRQNAAQCPFHGSVTNQSSNRTTNKDWWPNQLNLSILHQHDRKTNPHDEEFNYAEEFQKLDYWALKEDLRKLMTESQDWWPADYGHYGPLFIRMAWHSAGTYRTGDGRGGASTGTQRFAPLNSWPNNANLDKARRLLWPIKKKYGNKISWADLFILAGNVAIESMGGKTIGFGGGRVDVWHPEEDVYWGSEKEWLASERYSGDRELENPLAAVQMGLTYVNPEGPDGKPDPKAAARDIRETFRRMGMNDEETVALIAGGHTFGKAHGAGPATHVGPEPEAAPIEAQGLGWISSYGKGKGSDTITSGIEGAWTPTPTQWDTSYFDMLFGYDWWLTKSPAGAWQWMAVDPDEKDLAPDAEDPSKKVPTMMMTTDLALRFDPEYEKIARRFHQNPEEFAEAFARAWFKLTHRDMGPKTRYLGPEVPKEDFIWQDPIPEVDYELTEAEIEEIKAKILNSGLTVSELVKTAWASASTFRNSDKRGGANGARIRLAPQKDWEVNEPERLAKVLSVYEDIQRELPKKVSIADLIVLGGSAAVEKAARDAGFDVKVPFFPGRGDATQEQTDVESFAVLEPFADGFRNYQKQEYSVPPEELLVDKAQLLGLTAPEMTVLVGGLRVLGANYRDLPHGVFTDRIGVLTNDFFVNLLDMNYEWVPTDSGIYEIRDRKTGEVRWTATRVDLIFGSNSILRSYAEFYAQDDNQEKFVRDFINAWVKVMNADRFDLVKKARESVTALQDCYSVRSNDANTLQ

SEQ ID NO: 12334 - protein, 354 aa, Bradyrhizobium japonicum USDA 110
MTERDGYAAPTRGSKDPPMQYRQLGRTGLKVSPICLGTMMFGGPTDEAASTRIIAKAHDAGINFIDTADAYSKGGSEEVVGRAIGNNRHVWVLATKLANPMGDDPNRVGLSRRWVLQAADESLKRLGTDHIDIYYLHKEDHATPLEETVRAMGDLIRAGKVRYFGVSNYRAWRVAEICNICDRLGIDRPAVSQPYYNAMNRMPEVEHFPACAYYGLGIVPYSPLARGVLTGKYKPDAAPDKETRAGRNDTRMMQTEWRPESLQLAQEIKSHAEKKGITAGQFAVAWVLNSAFVSSIVAGPRTEEQWDGYISALDYRFTSEDEALIDRLVTPGHPSTPGYNDPAYPIEGRRARTA

SEQ ID NO: 12335 - protein, 216 aa, Triticum aestivum
  unsure (1)..(216): unsure at all Xaa locations
MAAAAGAATRPALVLGALVAALMMLGAEAVWLDLPPTGTKCVSEEIQPNVVVVADYMLMYEAHATAHPTVAVKVTSPYGNTVHHKENATVGQFAFTTSEAGNYLACFWXDSAEKGSGVSLNLDWKIGIATKDWDSVAKKEKIEGVELELAKLEAAVESIHHNLLYLKAREAEMREVSEKTNSRVAWFSILSLGVCVVVSALQLWHLQGFFQKKKLI

SEQ ID NO: 12336 - protein, 378 aa, Zea mays; identical to SEQ ID NO: 465

SEQ ID NO: 12337 - protein, 154 aa, Zea mays
  unsure (1)..(154): unsure at all Xaa locations
FWFVGEREEMAASDVEYRCFVGGLAWATDDHSLNNAFSTYGEVLESKIILDRETQRSRGFGFVTFSXXXAMRSAIEGMNGKELDGRNITVNEAQSRGGRGGGGGGYRGGRRDGGGYGGGGGGYGGGRGGYGGGGGYGGANRGGGYGNNDGNWRN

SEQ ID NO: 12338 - protein, 123 aa, Zea mays
MSLPYKQDLPPSGGFNPIKYKRNLPTKGPSGAIIFGAVFAVCTFGFWRVGLGNLEKRELQRERVWSRIHLTPLLLAESDRDVYRREQAALAREKEIMKDVPDWEAGKSSYHTKRYTPNTIVVI

SEQ ID NO: 12339 - protein, 228 aa, Zea mays; identical to SEQ ID NO: 11567

SEQ ID NO: 12340 - protein, 140 aa, Glycine max
EEEANLVICCVFEMGEIWWSLLGAAIPVVVAGQAFRVKKRRAEEQRLQSARGRERSSDEIFVCERVCTSKRMLKKVGSFSKDPIPDTCVTVCGVSDLDACADACARTVCINQHQVPNWNDICLRRCQSECLKLSSQSQSS

SEQ ID NO: 12341 - protein, 428 aa, Lemna paucicostata
MSFRSILSDVRDSIGSFSRRRGAEVRISGVSDNHRGRNRVTAGDFPGEIGGEIPAIYQSRWAGLPPELLRDVIKRLEESESSWPARKHVVACAAVCTAWREMCKEIVSGPEFCGKLTFPVSLKQPGPREGTIQCFIKRDKSKSRYHLFLGLSPTLPAENGKFLLSQSASRALPARNTSSPWNADDISRSSSTYIGKLRSNFLGTKFIMFDTQPPTRHCRPAPSSGRVSRRFYSKVSPKVPSGNYAIAQVTYELNVLGKRGPRRMHCTMNSIPSSALDAGGRVPAAPERILSRSLEDSFRSVSLSKDLGSSRFSEFGGEMEREEEEEGDRKKSGPLVLKNKAPRWHEQLQCWCLNFRGRVTVASVKNFQLIADGQATAAQAGASEHDKIILQFGKVGKDTFTMDNRYPLSAFQAFAICLSSFDTKLACE

SEQ ID NO: 12342 - protein, 748 aa, Synechocystis sp. PCC 6803
MATTVQLSDQSLRQLETLAIHTAHLIQPHGLVVVLQEPDLTISQISANCTGILGRSPEDLLGRTLGEVFDSFQIDPIQSRLTAGQISSLNPSKLWARVMGDDFVIFDGVFHRNSDGLLVCELEPAYTSDNLPFLGFYHMANAALNRLRQQANLRDFYDVIVEEVRRMTGFDRVMLYRFDENNHGDVIAEDKRDDMEPYLGLHYPESDIPQPARRLFIHNPIRVIPDVYGVAVPLTPAVNPSTNRAVDLTESILRSAYHCHLTYLKNMGVGASLTISLIKDGHLWGLIACHHQTPKVIPFELRKACEFFGRVVFSNISAQEDTETFDYRVQLAEHEAVLLDKMTTAADFVEGLTNHPDRLLGLTGSQGAAICFGEKLILVGETPDEKAVQYLLQWLENREVQDVFFTSSLSQIYPDAVNFKSVASGLLAIPIARHNFLLWFRPEVLQTVNWGGDPNHAYEATQEDGKIELHPRQSFDLWKEIVRLQSLPWQSVEIQSALALKKAIVNLILRQAEELAQLARNLERSNADLKKFAYIASHDLQEPLNQVSNYVQLLEMRYSEALDEDAKDFIDFAVTGVSLMQTLIDDILTYAKVDTQYAQLTFTDVQEVVDKALANLKQRIEESGAEIEVGSMPAVMADQIQLMQVFQNLIANGIKFAGDKSPKIKIWGDRQEDAWVFAVQDNGIGIDPQFFERIFVIFQRLHTRDEYKGTGMGLAICKKIIEGHQGQIWLESNPGEGSTFYFSIPIGN

SEQ ID NO: 12343 - protein, 295 aa, Chryseobacterium meningosepticum
TTNKPIVLSTWNFGLHANVEAWKVLSKGGKALDAVEKGVRLVEDDPTERSVGYGGRPDRDGRVTLDACIMDENYNIGSVACMEHIKNPISVARAVMEKTPHVMLVGDGALEFALSQGFKKENLLTAESEKEWKEWLKTSQYKPIVNIENHNTIGMIALDAQGNLSGACTTSGMAYKMHGRVGDSPIIGAGLFVDNEIGAATATGHGEEVIRTVGTHLVVELMNQGRTPQQACKEAVERIVKIVNRRGKNLKDIQVGFIALNKKGEYGAYCIQDGFNFAVHDQKGNRLETPGFALK

SEQ ID NO: 12344 - protein, 751 aa, Geobacillus stearothermophilus
MENQNRQNAAQCPFHGSVTNQSSNRTTNKDWWPNQLNLSILHQHDRKTNPHDEEFNYAEEFQKLDYWALKEDLRKLMTESQDWWPADYGHYGPLFIRMAWHSAGTYRIGDGRGGASTGTQRFAPLNSWPDNANLDKARRLLWPIKKKYGNKISWADLFILAGNVAIESMGGKTIGFGGGRVDVWHPEEDVYWGSEKEWLASERYSGDRELENPLAAVQMGLIYVNPEGPDGKPDPKAAARDIRETFRRMGMNDEETVALIAGGHTFGKAHGAGPATHVGPEPEAAPIEAQGLGWISSYGKGKGSDTITSGIEGAWTPTPTQWDTSYFDMLFGYDWWLTKSPAGAWQWMAVDPDEKDLAPDAEDPSKKVPTMMMTTDLALRFDPEYEKIARRFHQNPEEFAEAFARAWFKLTHRDMGPKTRYLGPEVPKEDFIWQDPIPEVDYELTEAEIEEIKAKILNSGLTVSELVKTAWASASTFRNSDKRGGANGARIRLAPQKDWEVNEPERLAKVLSVYEDIQRELPKKVSIADLIVLGGSAAVEKAARDAGFDVKVPFFPGRGDATQEQTDVESFAVLEPFADGFRNYQKQEYSVPPEELLVDKAQLLGLTAPEMTVLVGGLRVLGANYRDLPHGVFTDRIGVLTNDFFVNLLDMNYEWVPTDSGIYEIRDRKTGEVRWTATRVDLIFGSNSILRSYAEFYAQDDNQEKFVRDFINAWVKVMNADRFDLVKKARESVTALQGNGHNRSSIDEVLQ

SEQ ID NO: 12345 - protein, 441 aa, Oryza sativa
IEAKRVSANPRPSCVRRVLARKRRRPEATANSARKLQRREISALPCRAFSASTTRERFRNIQLQEEFDTHDPKEMGSLLPYLMKRSEIIEIVGASDIIFALSQSGVCAAFSRDEVIRSLFYNKNNDSLITVSVYGSENFSALRCRTTRIEYIRRGKPDAGFPLFETESLKWPGFVEFDDVNGKVLTYSAQDSTYKVFDLKNYTLLYTISDKNVQEIKISPGIMLLIYSRKKGCIPLDILSIEDGKRLKSFKHLLHRNKKVDFIEQFNEKLLIKQEGENLQILDVRNFQSIEVSRSEFVTPSAFIFLYEMQLFLTFRSRSVSVWNFRGELVTSFEDHMLWHPDCNTNSIYITSNQDLIISYCKADPNDPSSEENACSINISEILTGKCLAKIKAGNLNKQRVSKFQSTPSEALGDITALYYDEEREEIYTGNRLGLVHVWSN

SEQ ID NO: 12346 - protein, 241 aa, Bacillus subtilis subsp. subtilis str. 168
MFIGIVSLFLTVLVYLGAKKVYQRFPRVYTSPLLVTPAVLVGLLLLVNVPYESYNLGGGLLTDMLQPATVAFAIPLYKYFPVLKKYAVEIILNVAVGSCIAIISTALIAKWLHLGTGLIDSLVPRSVTTPIAVHVSEMIGGMPAVTAVFVILTALLGTVIGPMVIRYFRIDNEIARGVLLGTSAHGAGTSKAFELSSVSGTISSVSMILAAIMTLWPAPFCFHLCKKLSSRGQFFLCASPY

SEQ ID NO: 12347 - protein, 224 aa, Triticum aestivum; identical to SEQ ID NO: 4600

SEQ ID NO: 12348 - protein, 333 aa, Rhodospirillum rubrum
MSGEYAMDSLPLGSSGLRCSALGLGCMGMSEFYGPSDDARSLATLEAAVEQGITLFDTADMYGAGHNETLLGGFLKGRRDKVVLATKFAIVRPTAAYARTIDNSPAYVRSACEASLRRLGIDTIDLYYVHRRNPQTPLEDTLGALAELKAEGKIRAVGLSEVSAQTLRAAHAILPIAAVQSEYSLWTRDAEAEVLAACAELGITFVAYSPLGRAALTGAITPTTLVEGDFRRAMPRFGAEAWAVNRPLVEALGDFASARGATPAQVALAWLLGRPQPLVPIFGTRSPERLRENIGAAALRLSADDRAILDALFPPGIAQGMRYTEEGMKNLDV

SEQ ID NO: 12349 - protein, 152 aa, Zea mays; identical to SEQ ID NO: 3163

SEQ ID NO: 12350 - protein, 101 aa, Triticum aestivum
MLELPLVKGDPFHHVMEAILDLSDVAHVVCTTRGLNLLAVDTKHLAIVSLLFPAEDFKGYTCDEYISIGIPIRDLVNAIRCGDDKDTITLKVGEENFGTIT

SEQ ID NO: 12351 - protein, 283 aa, Streptococcus agalactiae 2603V/R
MATIQWFPGHMSKARRQVQENIKHVDFVTILVDARLPLSSQNPMLTKIVGDKPKLMILNKADLADPIRTKEWRDFYESQGLKTLAINSKEQSTVKKVTDIAKILMSDKIANLRGRGIQKETLRTMIIGIPNAGKSTLMNRLAGKKIAVVGNKPGVTKGQQWLKSNKELEILDTPGILWPKFEDELVGLKLALTGAIKDQLLPMDEVTIFGLNYFKTYYPDRLKERFKSINLEDEAPEIIMALTQKLGYRDDYDRFYNLFVKEVRDGKLGRYTLDIVGEHDGNN

SEQ ID NO: 12352 - protein, 183 aa, Thermoplasma volcanium
MDQLINKYYEKCLAFAIPFDLKVTSDPCAYFRQGSTIDGISELFSYGSKMCDFRGQLDERVKEMARQILPNTTALVGERLAMDLLVHAHGLKRLAYMPSSSIQMLGAERALFTAIQKRGNTPKYGVLFKYPKLSTLRPRQRGKIARIIANKVAITARADLLGTKVDAESFREKIDNMIKSSKK

SEQ ID NO: 12353 - protein, 351 aa, Bradyrhizobium japonicum USDA 110
MTATSIQEEAIMSQAKRIVLAARPVGEPKPSDFRIEEFAVPTPGQGEVLLRTIWLSLDPYMRGRMSDGPSYAAPVPIDGVMEGEAVSEVAASNNPDFAKGDIVRARTGWQTHAISSGKGLIKVDPKLGPISTSIGVLGMPGMTAYTGLLDIGKPQEGETVVVAGASGAVGSAVGQIAKIKGARAVGIAGGKDKCDYVVKELGFDACIDHRDPDLAAKLKDACPKGIDVYFENVGGAVFEAVFPLLNPFARVPVCGLIAHYNDTEAKPPKWAASMMRATLTKRLTFRGFIVSDFAARHGDFLRDMSAWVREGKVKYKEFVTEGLESAPGAFMGLLKGANFGKQLVRVGQDKA

SEQ ID NO: 12354 - protein, 230 aa, Vigna radiata
ELKCFDGFKSGRSDPSGIIGSPFVCRVKIALKLKGVEYKYVEENFRNKSEQLLKYNPVHKKVPVFVHGDKPLPESLVIVEYIDETWNNNPILASDPYQRALARFWSKFIDDKIVGASWKSVFTVDEKEREKNIAETYESLQFLENEIKEKKFFGGEELGLVDIAAVYVAFWIPLIQEIAGLELLTSEKFPNLYRWSQEFLNHPIVKESLPPRDPVFAFFKGRYEGLFSSK

SEQ ID NO: 12355 - protein, 274 aa, Oenococcus oeni
MIENEKQLKRNFGFFGTLSLVIGTVIGSGIFFKQGRVLQEAGSAKMALLAWVVGGVLTLSSAMSVAELGSEMPQTGGIYIYISKIFGKFWGFLAGWMQISFYGPALIASVSYFFSTLFVTFFKLPTKITFFSFSMRSVVAVSILACILIALMNMLENRVSRTFAITTTVIKMIPIFALILFGLFFGKTGATGSAISVLSEQVDKGNFGVAVLSTLFAYDGWVIISNLGGEIKNAQKNLPRAVTIGIFIVLLAYMGVSFGVFSSLPGKEIVSLGD

SEQ ID NO: 12356 - protein, 222 aa, Zea mays; identical to SEQ ID NO: 9178

SEQ ID NO: 12357 - protein, 348 aa, Pyrococcus abyssi
MSEKMVAIMKTKPAYGAELVEVDVPKPGPGEVLIKVIATSICGTDLHIYEWNEWAQSRIKPPQIMGHEVAGEVVEVGPGVEGIEVGDYVSVETHIVCGKCYACRRGQYHVCQNTKIFGVDTDGVFAEYAVVPAQNVWKNPKSIPPEYATLQEPLGNAVDTVLAGPISGKSVLITGAGPLGLLGIAVAKASGAYPVIVSEPSDFRRELAKKVGADYVINPFEEDVVKEVMDITDGNGVDVFLEFSGAPKALEQGLQAVTPAGRVSLLGLYPGKVSIDFNNLIIFKALTVYGITGRHLWETWYTVSRLLQSGKLNLDPIITHKYKGFDKYEEAFELMRAGKTGKVVFMLK

SEQ ID NO: 12358 - protein, 533 aa, Gerbera hybrid cv. 'Terra Regina'
MENLRPKLAMAVKSIQWSYAIFWSISTVPGVLAWCDGYYNGDIKTRKTIQAEEINDDDNDDYEVGLQRTEQLRQLYESLSSASETHPYSYEQQTRRPAAALSPEDLTDTEWYFLVCMTFEFTKGQGLPGRTLAKNTASWLCNAHFADSKVFSRSLLAKSASIQTVVCFPYLEGIVEFGITEKVLEEQNIIKQIKASIFDTPSKRFLETPLESCSAMLDHDDLDMILECETIKNRNNSPKNSLNCSREQSLQFLDDEEDGDVSFFNNNSVGSSDCISQNLISGPNDLWSDDDSRYQCVLSTIFKNTRRLILGPHFTQCNGKESGFVSWKNDGMEWNVSSSQSLLKKVLYEVPKMYENGSGLAGFPGRVWKPEGDDVKNINHRFSVLGSLVPSRGKVLDKVSLLDDTIEYLKALEKRVEALQSTKDERERTSDNYANKRKASCNLEELRQDCPSDCITVSAIEKEVTIEIRCRWRDNMMVQVFDAMNSLNLESHSVHSSTVDGILSLSIESKSKGCTVSTAKMIRQALQRVIGRY

SEQ ID NO: 12359 - protein, 261 aa, Triticum aestivum
MAAAANGGGGESKAAFARIYDALKAELLRDPAFEYTESSHQWIDRMLDYNVLGGKCNRGLSVVDSYKLLKGVDVLTEEEMFLASTLGWCIEWLQAFFLVLDDIMDDSHTRRGQPCWFRVSQVGLIAVNDGILLRNHISRMLRLHFKKKPYYADLLDLFNEVEFKTASGQMLDLITTHEGEKDLTKYNIGVHRRIVQFKTAYYSFYLPVACALLLSGESLENYSAVENILVEMGTYFQVQGSLDPSLPSSASAFLRGASRPA

SEQ ID NO: 12360 - protein, 264 aa, Nicotiana tabacum
MLELRLVQGSLLKKVLESIKDLVNDANFDCSATGFSLQAMDSSHVALVALLLRSEGFEHYRCDRNISMGMNLANMAKMLKCAGNDDIITLKADDGSDTVTFMFESPTQDKIADFEMKLMDIDSEHLGIPEAEYHAIVRMPSAEFSRICKDLSSIGDTVVISVTKEGVKFSTRGDIGTANIVCRQNTTVDKPEEATVIEMNEPVSLTFALRYLNSFTKATPLSNTVTISLSSELPVVVEYKIAEMGYIRFYLAPKIEEDEEETKP

SEQ ID NO: 12361 - protein, 511 aa, Nicotiana tabacum
MMIDLELSTSLLFCLIPFLFLLFIKTTLANLFSSNKSTSKIPKSYPIIGSCFSILANKERRIQWTSDIMQNTSNLTFTLNRPFGFRQIFTANPANVQHMLKTQFHIYQKGDVFKTTMADFLGDGIFNVDGDIWKYQRQVSSHEFNTKSLRKFVETVVDTELNERLIPILATAAVEKTVLDFQDILQRFAFDNICKIAFGYDPAYLLPSLPQAKFAVAFEEAVKLSSERFNAIFPFVWKIKRNFNIGSEKKIRVAVNEVRQFAKELVKEKQKELKEKSSLDSVDLLSRFLSSGHSDEDFVTDIVISFILAGRDTTSAALTWFFWLIFEHPETENQILKEAKAKSESPVYDEVKDMIYTHASLCESMRFYPPIPIDTKAATEDNILPDGTFVKKGTRVSYHIYAMGRVENLWGKDWAEFRPERWLDKDEASGNWTFVARDTYTYPVFQAGPRICLGKEMAFLQMKRVVAGVLRRFKVVPLAEKGVEPVFLSYLTAKMKGGFPVTIEERNGTDI

SEQ ID NO: 12362 - protein, 359 aa, Arabidopsis thaliana
MISKDPRSSLPPGFRFHPTDEELILHYLRKKVSSSPVPLSIIADVDIYKSDPWDLPAKAPFGEKEWYFFSPRDRKYPNGARPNRAAASGYWKATGTDKLIAVPNGEGFHENIGIKKALVFYRGKPPKGVKTNWIMHEYRLADSLSPKRINSSRSGGSEVNNNFGDRNSKEYSMRLDDWVLCRIYKKSHASLSSPDVALVTSNQEHEENDNEPFVDRGTFLPNLQNDQPLKRQKSSCSFSNLLDATDLTFLANFLNETPENRSESDFSFMIGNFSNPDIYGNHYLDQKLPQLSSPTSETSGIGSKRERVDFAEETINASKKMMNTYSYNNSIDQMDHSMMQQPSFLNQELMMSSHLQYQG

SEQ ID NO: 12363 - protein, 637 aa, Lotus uliginosus
MQQKNLSAQLAVAVRSIQWSYGIFWAPSTTQQRELEWRDGFYNGDIKTMKTVQTMETKADKIGLQRSEQLRELYRFLLEGEADPQAKRPSASLSPEDLSDSEWYYLVCMSFVFYPNQSLPGKALEIGETVWLCNAQQADSKFFSRSLLAKSASIQTVVCFPYLGGVIEIGTTEVVSEDPNLIQHVKTCFLEVSKPTCSDKSSSAHDKPHDDNKYPTCTKGDHEVFDKMPLENSCSFAEELKFDEYPGRELQDDDNNEDCDMDGFSDGGYDHYESMIEGINEGGSSQVHFVNDGGEINGAPDSLSSCDCMSEAFDNHGKKDSKNVTQIQQRELLDCDDHSKSSSLDIGADEDLYYTKTLCAILGNSSSFAQNLCASKSSFVKWKKGGVSERKRPWLQQMMLKKTLFDVPFMHLSCSSLKLQKENGRKEWTSKLENADNFMGNVFSDKKRESRNIQVLKSVAPSACEVEKISVLGGTIKYLKNLEARVEELESYMDTTATGARTKRKCPDVLEQISDNYGPSNIYMGMKKPMINKRKACDIDNIDTGLDIIVSEEDKPLDVKVNMKEEEVLIEMKCPYREYILYDIMDAINNLHIDAHTVDSSTADGVLTFKLKSKFRGAATAPVRMIKEALWKVSGKI

SEQ ID NO: 12364 - protein, 210 aa, Glycine max
MADAETFAFQAEINQLLSLIINTFYSNASDALDKIRFESLTDKSKLDAQPELFTTHLHFSNTSQSLFQLSLFSTMACTTVVLTLVAALLVTSVVAQSPASSPALSPKRTPVATPQKSPSPAISPSAVSPSSSPPAPVVNTPSPSPNSVDSPPSPPQSPSVSPAGVPSVTPSAISAPPTGAPAPSQNGAALNRFTVAGSAAVVVFAAALLM

SEQ ID NO: 12365 - protein, 357 aa, Zea mays; identical to SEQ ID NO: 11474

SEQ ID NO: 12366 - protein, 98 aa, Glycine max
MKKEDTVKLISAEGFEFVVDKEAAIVSQTIHNMLTSPGSFAERQHGEVTFPEISTTILEKICQYFYWHLQFASGKETEFSIEPELTLELMMAANYLHT

SEQ ID NO: 12367 - protein, 365 aa, Oryza sativa
  unsure (1)..(365): unsure at all Xaa locations
XGRARAHSFAAAAARHAGSAAAAPNAVSHRASSSFSSGDRLRSLVRRGELDEALRLVGSARRPDAGTCAALIKKLSASGRTAEARRVLXXACGPDVMAYNAMVAGYCGAGQLDAARRLVAEMPVEPDAYTYNTLIRGLCGRGRTANALAVLDEMLRRRCVPDVVTYTILLEATCKRSGYKQAMKLLDEMRDKGCTPDIVTYNVVVNGICQEGRVDDAIEFLKNLPSYGCEPNTVSYNIVLKGLCTAERWEDAEELMGEMGQKGCPPNVVTFNMLISFLCRKGLVEPALEVLEQIPKGCYPDIVSYNTLLTALCRSGEVDVAVELLHQLKDKGCAPVLISYNTVIDGLTKAGKTKEALELLNEMAX

SEQ ID NO: 12368 - protein, 194 aa, Oryza sativa
  unsure (1)..(194): unsure at all Xaa locations
XGCRNRHEDKQLEQEILDFSQGLRAIGVAPDEKIALFADNSCRWLVADQGIMATGAINVVRGTRSSDEELFQIYTHSESIALVVDSPQFFNRLAESFISRINARFIVLLWGEKSCLNSEVVNVPLYDFKDITQLGRESRNTLRHSHEQGQHVFETITPDDVATLIYTSGTSGTPKGVMLTHRKLLHQIKNLWDF

SEQ ID NO: 12369 - protein, 505 aa, Candida tropicalis
MYQLFCFLAGIIVVYKAAQYYKRRTLVTKFHCKPARISPNKSWLEYLGIASVVHADEMIRKGGLYSEIDGRFKSLDVSTFKSITLGKTTYVTKDIENIRHILSATEMNSWNLGARPIALRPFIGDGIFASEGQSWKHSRIMLRPVFAKEHVKQITSMEPYVQLLIKIIKNHEGEPLEFQTLAHLFTIDYSTDFLLGESCDSLKDFLGEESNSTLDTSLRLAFASQFNKTQQQMTIRFMLGKLAFLMYPKSFQYSIQMQKDFVDVYIDRVVGMSEEELNNHPKSYVLLYQLARQTKNRDILQDELMSILLAGRDTTASLLTFLFFELSHHPEVFNKLKEEIERHFPDVESVTFGTIQRCDYLQWCINETMRLHPSVPFNFRTAANDTVIPRGGGKSCTDPILVHKGEQVLFSFYSVNREEKYFGTNTDKFAPERWSESLRRTEFIPFSAGPRACLGQQLPRVEASYVTIRLLQTFHGLHNASKQYPPNRVVAATMRLTDGCNVCFI

SEQ ID NO: 12370 - protein, 331 aa, Rhodopseudomonas palustris
MPMQTEQEETAVKSTDRLARFGDRLSLPLIAAPMFLVSGIDLVAAACSSGVIGSFPTVNCRTTEQLGDWLGEINRRIAAYEQASGRRAAPWCPNLIVHRSNARLADDLKLLLQHRPEVVITSVGSPQPVIAPLHDVGAMVLADVASIRHAERAAAAGVDGLVLLTAGAGGQTGWLNPFAFVRAVRQFFDGVIVLAGGISDGVALRAAMTLGCDLGYMGTKFIATEESLADLRYKAMLVEASADDILLTKAFTGLQTNMLRPSIVAAGLDPDDLPERGGIDIGKDIDVGAREDRPKRWRDIWSAGHSTSGIGGVVPIAELVAKTTAEFRSAA

SEQ ID NO: 12371 - protein, 198 aa, Oryza schlechteri
GQTPVFPRIFGHEAGGIVESVGEGVTDLALGDHVLPVFTGECKECPHCKSAESNMCDLLRINTDRGVMIGDGKSRFSINGKPIYHFVGTSTFSEYTVMHVGCVAKINPKAPLDKVCVLSCGISTGLGATINVAKPPKGSTVAIFGLGAVGLAAAEGARIAGASRIIGVDLNANRFEEARKFGCTEFVNPKDHDKPVQQ

SEQ ID NO: 12372 - protein, 474 aa, Zea mays
  unsure (1)..(474): unsure at all Xaa locations
MPSGGGNGGGSSRSRVMPNLPAGFRFHPTDEELMVHYLMRQAASMPCPVPIIAEVNIYQCNPWDLPAKALFGDKEWFFFSPRDRKYPNGARPNRAAGSGYWKATGTDKAILSSSSTPTIQNVVVGVKKALVFYGGRPPKGTKTDWIMHEYRLSGAADDDCKGSSTRRRLSFXRFAWFQLDDWVLCRIHKKSNDFQLSSSSEHEHEQEEPAAGGSATTVEELDALVVVDNSSSSDTTTTTITTNDNNSTETATHHDPQTMMMLSKSCSLTDLLDSIDYAALSSQMLLLDAPHPHADDPPPHMVYYPPAASATHQQAIIANNTNGNDDYYDDDNLLPTAAPTAVDAAAALLSSSPADTNGVNKRKRVTAVDYGAAEPPTFFHHHLDDAAGNSFSTKKLKPPPPSDSRHGGHFGTATATSYRDSQQQLVHSPSSSNSNSSGGFFHQYGYGYGYSSNNPFLNLNQQQQLLLNSHIGMQ

SEQ ID NO: 12373 - protein, 207 aa, Zea mays; identical to SEQ ID NO: 6691

SEQ ID NO: 12374 - protein, 445 aa, Escherichia coli O157:H7 EDL933 [sequence omitted]

SEQ ID NO: 12375 - protein, 500 aa, Caulobacter crescentus CB15
MQSMADAETADTFGCHALVGGTPKVSFWTRRKAIDTITAGHADSHQLKKTLSWPHLVALGVGAIVGTGIYTLTGVGAGLAGPGVILSFLIAGAVCACAALCYAELSTMIPASGSAYTYSYAAMGEPVAWFVGWSLILEYTLVCAAVAVGWSAHAHGLFKMIGFPDALLAGPHQGGLINMPAVFISMAVAGLLALGTRESATVNMVLVFVKIIALIVFVVLCLPAFNLAHFTPFMPNGFQAHVPEGAAADAAKVGVMAAASLIFFAFYGFDAVSTAAEETKNPKRDLTIGIVGSMAVCTAIYMIVAAVSIGASRTEVFSKSEAPLVFILESLNHGKIAQLVALAAVIALPTVILAFMYGQSRIFFVMARDGLLPRALSKVNAKTGTPVMMTLLTGVLAAVISGLLSLKDIAELANAGTLWAFIAVGASVILLRLREPNRPRVFSTPLWPIVAPAGILGCLYLFLSLPGKTQLYFLYAHLIGAVVYLAYGMRKSVLAQQERA

SEQ ID NO: 12376 - protein, 161 aa, Zea mays
  unsure (1)..(161): unsure at all Xaa locations
EMDSYXGGGMPILAQLTDMPPAFNQMYCRIASQKYIFFCDPHRRGRACIKKILLTTCLXDLMELHQESEEEVXHTEQAENXVLVVSDPAQAGYASSLTSAQRVGGLSLALVXHSAGSPCKRELTLDAGGPLSVTFSDTEFHXPVRXGKLXHPPPGSYSSQT

SEQ ID NO: 12377 - protein, 266 aa, Glycine max
  unsure (1)..(266): unsure at all Xaa locations
MAASLQLFQCKLARPFRSFPLRRSTPPLSLRCCASPPSSYSITLIPGDGIGPEIISVAKDVLVLVGSLEGIKFEFQEVLMGGAALDATGVPLPDDTLSAAKQSHAVLLGAVGGYKWDKNEKHLKPETGLLQIRKELGVFANLRPATVYSPLVDASTLKREVAEGVDIMLIRELTGGIYFGEPTGFGTNENGEEIGFNTEIYATHEIDRIAHFAFKVAQKRRKKLRSAVKNTVLHASVGVKKXIFVKTHAYPDVELSHMYVDNAXLP

SEQ ID NO: 12378 - protein, 189 aa, Sphingomonas elodea
MAIAEPEGDAPDTPVLTSARLRLRPLVAEDADALHPAYADVELMRWWSHAPHADLAQTRAWFAEEDEEGWRHWAITRAGDDAAIGFVAVNEKRKNVSEIGYLLARPHWGTGIAAEALTLVLDQLFLAEGYRRVFADTDPDNVYSRRLLERLGFRLEGVLRAEWETHIGIRDTTLYGLLKEDWTCRPRRT

SEQ ID NO: 12379 - protein, 630 aa, Listeria monocytogenes
VKEKHNPRRKYCLISGLAIIFSLWIIIGNGAKVQAETITVSTPIKQIFPDDAFAETIKDNLKKKSVTDAVTQNELNSIDQIIANNSDIKSVQGIQYLPNVTKLFLNGNKLTDIKPLTNLKNLGWLFLDENKIKDLSSLKDLKKLKSLSLEHNGISDINGLVHLPQLESLYLGNNKITDITVLSRLTKLDTLSLEDNQISDIVPLAGLTKLQNLYLSKNHISDLRALAGLKNLDVLELFSQECLNKPINHQSNLVVPNTVKNTDGSLVTPEIISDDGDYEKPNVKWHLPEFTNEVSFIFYQPVTIGKAKARFHGRVTQPLKEVYTVSYDVDGTVIKTKVEAGTRITAPKPPTKQGYVFKGWYTEKNGGHEWNFNTDYMSGNDFTLYAVFKAETTEKTVNLTRYVKYIRGNAGIYKLPREDNSLKQGTLASHRCKALTVDREARNGGKLWYRLKNIGWTKAENLSLDRYDKMEYDKGVTAYARVRNASGNSVWTKPYNTAGAKHVNKLSVYQGKNMRILREAKTPITTWYQFSIGGKVIGWVDTRALNTFYKQSMEKPTRLTRYVSANKAGESYYKVPVADNPVKRGTLAKYKNQKLIVDCQATIEGQLWYRIRTSSTFIGWTKAANLRAQK

SEQ ID NO: 12380 - protein, 92 aa, Glycine max
MASIIMSFAPATGRVFAATAAKGAGGSKEKGLLDWIIGGLQKEDQLVETDPILKKVEEKNGGTTTTTTGRNKNSVAVPQKKKGGFGGLFAKN

SEQ ID NO: 12381 - protein, 54 aa, Triticum aestivum
QAEEDERFVKEWKKYLEEEARIMKDVPGWKVGESVYNSGKWMPPATGELRPEVW

SEQ ID NO: 12382 - protein, 254 aa, Methanosarcina mazei Goe1
MTSYKALVKDVINKADVLLEVVDARFPDETRNSEVEKEIIRLKKPFIIVINKCDLVSKEKLDKTKSRLSRIAPTVFISSKDRSGTTMLRHQILASACIKGRDILVGTLGYPNVGKSSVINGVTGRHRASTSPVSGHTKGVQHVDAGSHIMFMDTPGVIPFDENDEYVQGLLGIKDSTHLKDPVGVALMIIDKMLAENRTALESFYNVTLESPDSYSVLEQIGRKCNFLQKKGEIDEMRTATKIIGDWQNGLLLV

SEQ ID NO: 12383 - protein, 659 aa, Neurospora crassa
MAGFDQDIELSAYSHSHGLGISGNGRSGRQRSIAEASSFTLGGASPSPRTKSFADVSPGGSHGRSKSIAAASDGAGGGFHGTMSRFVDSFRRGDGTINKNLDLDDDNNTSSHGYSSHSISRGHGGTRYYDLRPGTGKINTPSSLLARELKGRHLQMIAIGGSIGTGLFVASGKTLSDGGPASVLIAYLIIGVMLFCTIQALGELAVIFPVAGSFSAFSTRFLDPSWGFAMGWNYALQWIGVLPLEVLAGAMTIGYWNKEINKAIFVTIFLVIIFVINLFGAKGYGEAEFIFAIIKVTAVVGFILLGIVINIGGTPTEGYIGGKYWEDPGAFHNGFKGLCSVFVTAAFAFAGTELVGLAAAETANPRKSLPTAIKQVFWRISLFYIVSMTLVGLLVPYNEPRLLNAQNIADASASPFVIAIESAGATVLPSVMNGVILISVISVGNSAVYGSSRTLAALAELGQAPAILAYVDRRGRPIVAILVTMAVGLLAYLGDVPSQKNIFDWLLAISGLSSILTWASTCLAHIRLRKAWAYNHRSVQDIAFKAQGGVIGSWIGFVLNVLVLVTQIWVSIDPLHQGDTPLTTKERVRSFFVSCLAIPVVLICTIVHKWYYKTKWVRIEDMDVDTGRRDFGRLGIIKAQEKEERMGWPRWKRVYRFMC

SEQ ID NO: 12384 - protein, 288 aa, Glycine max; identical to SEQ ID NO: 10509

SEQ ID NO: 12385 - protein, 217 aa, Solanum tuberosum
MAEVKLLGLRYSPFSHRVEWALKIKGVKYEFIEEDLQNKSPLLLQSNPIHKKIPVLIHNGKCICESMVILEYIDEAFEGPSILPKDPYDRALARFWAKYVEDKGAAVWKSFFSKGEEQEKAKEEAYEMLKILDNEFKDKKCFVGDKFGFADIVANGAALYLGILEEVSGIVLATSEKFPNFCAWRDEYCTQNEEYFPSRDELLIRYRAYIQPVDASK

SEQ ID NO: 12386 - protein, 343 aa, Arabidopsis thaliana
  unsure (1)..(343): unsure at all Xaa locations
MTTNKQVIFKDHVXXFPKESDFNFTTTTVELRVPEGSKSVLVKNLYLSCDPYMRSRMGKPDPSSALAQAYAPGKPIYGYGVSRVIESGHPDYKKGDLLWGIVGWEEYSVITPMAHMHFKIQHTDVPLSYYTGLLGMPGMTAYAGFYEVCSPKKGETVYVSAASGAVGQLVGQFAKMMGCYVVGSAGSKEKVDLLKTKFGFDDAFNYKEESDLSAALKRCFPKGIDMYFENVGGKMLDAVLLNMNPHGRIAVCGMISQYNLENQEGVHNLSNIIYKRIRIQGFVVSDFYDKYPKFLELVLPRIKEGKITYVEDVADGLEKAPEALVGLFHGKNVGKQVVVIARE

SEQ ID NO: 12387 - protein, 538 aa, Aeropyrum pernix
MPGLSARKGTEKLGFWEVFSIGVGGMIGGGIFATLGLSLELAGAAAPLAFLLAGSVALITSYSYAKLSSRYPSEGGTIEFIVRAYGDNVISGGLNIMLLASYIVMISLYAHAFGSYGASMINCCPREAYIALVVFVIAGLTVVNMLGAIMSGRVELGLVIFKLLVLILVAVVSMPLVDWNRLGVREWPSILSIVAGGMIIFLAYEGFELVANTAKDVRDTTTLRKGLYASVVTVIIVYVLIAIVAAGTLDPDTVRIARDYALAVLVEPVLGKIGFTLVVAAALASTSSAINATLYGSARVSYIIAKYGEAPQLLGRHIWRGAYEGLLVISILGLLLALYASLEQISTAGSGGFLIIFAAVNLAAYKLRRETGANPLISLVGFILNLTSLAILVYQMASMNPGELAILAVLIAGSMAAEALYRRIKGRRLPQVIDPSLKVRESLISGWRNLTARAAEIIKREIMNAEVYITGSIARGEYEKSGDIDLIVSTTKPLSPHEVKFIEERLVKELNLPPSHPLHIHTVTRDKLENFKHKVKID

SEQ ID NO: 12388 - protein, 143 aa, Zea mays; identical to SEQ ID NO: 2031

SEQ ID NO: 12389 - protein, 427 aa, Coxiella burnetii RSA 493
MTELTGVSIVTYQHIKVPSQGEKITVNKAVLEVPDRPIIPFIEGDGIGIDIAPVMKNVVDAAVEKSYAGKRKIEWMEIYAGEKATKVYGKDNWLPDETLEAIKEYQVAIKGPLTTPVGGGIRSLNVALRQQLDLYVCLRPVRYFTGVPSPVKTPEKVNMVIFRENSEDIYAGIEWPAGSPEAVKLINFLQNEMGVKKIRFPETAGIGIKPVSKEGTSRLVRRAIQYAIDNDRDSVTLVHKGNIMKFTEGAFKDWGYEVAVKEFGAKPLDGGPWHVFENPKTGQKITIKDVIADAFLQQILLRPAEYSVIATLNLNGDYISDALAAEVGGIGIAPGANLSDTVGLFEATHGTAPKYAGQDKVNPGSLILSAEMMLRYLGWKEAADLVVQGIEGAIESKTVTYDFARLMTGAKEVSTSQFGKAIIKHIL

SEQ ID NO: 12390 - protein, 313 aa, Triticum aestivum
MGYIGAHGVETLKRYRYSGQDHSVVAKYVLQPFWSRCVTLFPLWMPPNMITLMGFMFLLTSSLLSYIYSPHLDTAPPRWVHLAHGILLFLYQTFDAVDGKQARRTSSSSPLGELFDHGCDALACAFEALALGSTLMCGRLTFCYWVVAAVPFYLATWEHYFTNTLILPVINGPTEGLMLIYVSHLFTFFTGAEWWAQDFRKSLPLISLVPLPFVPEIPLYVIVLILMIMFAVIPTVGSNIGNVQKVVDARKGSMELALAMLLPFIALLAGVAVWCYLSPSDIMKNQPHLLVIGTGSAFGYLVGKMILAHLCDE

SEQ ID NO: 12391 - protein, 472 aa, Pseudomonas putida KT2440
MPVGNHSAHGQATEGGPLKRELGERHIRLMALGACIGVGLFLGSAKAIEMAGPAIMLSYIIGGLAILVIMRALGEMAVHNPVAGSFSRYAQDYLGPLAGFLTGWNYWFLWLVTCVAEITAVAIYMGIWFPDVPRWIWALAALGSMGAVNLVAVKAFGEFEFWFALIKIVTIIAMVLGGIGIIAFGFGNDGVAVGISNLWSNGGFMPNGVTGVLMSLQMVMFAYLGVEMIGLTAGEARNPQKTIPQAIGSVFWRILLFYVGALFVILSIYPWNEIGSQGSPFVMTFERLGIKTAAGIINFVVITAALSSCNGGIFSTGRMLYSLAQNGQAPAAFARTSKNGVPRNALLLSIGALLLGVLANYLVPEKVFVWVTSIATFGAIWTWVMILLAQLKFRAGLTTAERKALKYRMWLWPLSSYLALAFLVLVVGLMAYFEDTRVALYIGPAFLVLLTVLYYTFRLAPKDAQGVTSTAS

SEQ ID NO: 12392 - protein, 279 aa, Triticum aestivum
MAPWGLGGERSKGLRPKMTITIFLKIMGLAFLEPVIDQNLYFMGAKLTSAGFATARGDILPFFTFVLALLLRMEKVRRRSLHSQAKIAGTVLTVAGAVLMVLYHGPMVQFPWTKGQHHATASGQGVGGAANARDWLNGTIMVIIACVAWACFFILQSNTLRSYPAELSLTVLICGMGSLMSGAIALVAERANTQAWVIGFDMRLFTAVYAGIVCSGVAYYVQGIVSRQRGPVFVTAFNPLCMIITAVMGSIILKEEINLGSVIGAAIIVGGLYFLIWGK

SEQ ID NO: 12393 - protein, 752 aa, Cellvibrio gilvus
MHRKNHAAAAARTALVAAIAAAFPLFTPGAFAAPEPAEPAQKPWLDASLDADQRARLAVQAMTQQEKLRWVFGYFGHDFGKSKKHPDALPQSAGYIPGTPRLGLPALFETDAGQGVASQSGANVRERTALPSGLSTASTWDPKVAYAGGAMIGSEARASGFNVMLAGGVNLQREPRNGRNFEYAGEDPLLAGTMIGQAIKGVESNRIISTLKHFVLNDQETGRNELDARIDKAALRMSDLLAMELALEQSDAGSVMCAYNRLNGPYTCEHPWLLSEVLKRDWGFRGYVMSDWGATHSTVAAANSGLDQQSGQEFDKSPYFGGALEEAVKTGAVPQKRLDDMVTRIVRTMFGKGVVDNPLKPGVAIDFAANGGQPPDGEEGMVLLKNEGRLLPLAKTVRTIAVIGGHADAGVLSGGGSSQVYPVGGIAVKGLLPATWPGPVVYYPSSPLRAIQAQAPNAKVVFDDGRDPARAARVAAGADVALVFANQWIGEANDAQTLALPDGQEELITSVAGANGRTVVVLQTGGPVTMPWLARVPAVLEAWYPGTSGGEAIANVLFGAVNPSGHLPATFPQSEQQLPRPKLDGDPKNPELQFAVDYHEGAAVGYKWFDLKGHKPLFPFGHGLSYTTFAYSGLSGQLKDGRLHVRFKVTNTGNVAGKDVPQVYAAPMSTKWEAPKRLAAWSKVALLPGETKEVEVAVEPRVLAMFDEKSRTWRRPKGKIRLTLAEDASAANATSVTVELPASTLDARGRAR

SEQ ID NO: 12394 - protein, 363 aa, Rhodopseudomonas palustris
MRSQDLFAMPSNMPHDAEAPASDARLWTRILAEYGTPSRSRSIAELTITALPLVALWSAAWFVYSMGHAWASLLIAIPAAGFLLRLFMIQHDCGHGAFFSKRQANDWVGRAIGVITLTPYDCWRRQHATHHATTGNLDRRGVGDLDTLTVREYSELSWWGRLKYRLYRNPLVMFGLGPAYVFLLQQRLPVGLMRDGWRPWVSAMATNAAIAGIVVTLTWFIGIKAFLLVHLPIMLLAATAGVWLFYVQHQFETTTWEHNERWSLHQAALYGSSYYDLPAPLSWFTANIGMHHVHHLASRIPYYRLPRVLHDHPELRAIGRVTLWQSFRCIPLALWDEAQRRLVSFRDVRAQKQQQATVGLATR

SEQ ID NO: 12395 - protein, 376 aa, Glycine max
MVKDTKPLAYAANNGYQKEAFDPSAPPPFKIAEIRVAIPKHCWVKSPWRSLSYVLRDVLVIAALMAAASHFNNWLLWLIYWPIQGTMFWALFVLGHDCGHGSFSDSPFLNSLVGHILHSSILVPYHGWRISHRTHHQNHGHIEKDESWVPLTEKIYKNLDNMTRLVRFTVPFPLFVYPIYLFSRSPGKEGSHFNPYSNLFPPSERKGIAISTLCWVTMFSMLIYLSFITSPVLLLKLYGIPYWIFVMWLDFVTYLHHHGHHQKLPWYRGKEWSYLRGGLTTVDRDYGWINNIHHDIGTHVIHHLFPQIPHYHLVEATQAAKSVLGEYYREPERSAPLPFHLIKYLIQSMRQDHFVSDTGDVVYYQTDSLHLHSHRD

SEQ ID NO: 12396 - protein, 95 aa, Oxalis tuberosa
LYAGINISGTNGEVMPGQWEYQVGPSVGIEAGDHIWASRYILEGITEQAGVVLTLDPKPIDGDWNGAGCHTNYSTKSMRDEGGFEVIKKAIFNLS

SEQ ID NO: 12397 - protein, 1750 aa, Neurospora crassa
MATSNAADGIQFATSSSIIPQDIDPGKHHVDPHLANFDLRQHIDFNISPEDLHECWLPPYNALCNENWDEFYNAWKRVQIPYLDCNDFGDTLQTMSHDTRIAYQQQHNGLCALRHAFRRQGDAYIAPEDFDYCPGTVPSSPSKEAIHHFAYRLISMVQKQEQAVLGQFDGGAKGGSPGKWWIAPPDQSIELPSVETPDKAQPDGDGDGFTELGALDKARLEAADYTVHWVCYQNSHLAVIIRERVTGHTWYFDSLNTPKDDATVYLNEKHQSVLSSLHKWLSKNKDDFSVVPDGSRHRHVQVIPQDLPWTCGLHAIAHALAFLRFGLLGWHEIPTYAREKTDKVKLTKFRHDMMKAMELSMGFRPPPRMNASNKIPLPEHYDHQLDLSTFRFPTYPSVGVEKKDLHSCDNFPFNWPFPENLDNKHDKTLRENYRRVHVECYDGVSLGHGSLDPFSRKVYSDLHNGLYKMRNHDLLEGEEVHFHATRLMKIIQDQEGAALGPAKEDNQDWWLAPISYAIRCERNEDTGENSAKSASILPPETFNDEFFKRECGDRSKDRDQFENAKYTVHWVHYRDSHQKDKGVFEHWAVIIREKATNFAWYFDSTKKDRKQRKDRAIDAFNEWLVKCREPNSDFPKEVTQSFLVPAPQQSSGWECSLHAIAHSVAFIRFGILGWHALPLEAIALEEGSKGTGDQTAASAPSDRSERLCETMISSLHGLMGVSLPSTTSKDDGNGTVEAVSGSNKNTNSNSANKTNASSSRNSNPGRSGKSNQGGSARKPSNAMAKSSQPPGKNSAVTETIPRHHGNKHAVPHPNFFNKVQYEKQRAEFRFPTYPSIPLRAEYVRSVNEEPFNAKMTLDKVYAYSQVSTHKSPSCDRVTLNQSPYAEQAFADINDALLNSRRGDWLDGKGMYHLASRLITYVQKENPVIPLGPFENGQWWIAPHPFIIDVPDPDDDSNLQPARTFSDVDQNVWGFDSSDFGEVEERLFNQARYTVHFIHHPTHWTVIVREAETGHLWHFDSLARGLGRFRRAIDAFEDWLRRCNKPIPATSQAFQVPVTLQTRNWECSLHAIASAMAMLRFGILGWDKLPCLALETDPDPVGPAGSVTADNLTEIMKRSLHGIFGLMLDEDIPNVAQRKKQEQDDEALLMAMQDDSIMNRANMSFDAVIDSVTNNPSELEILNQQERMAREAREKNRKEQKEKDDREMKERDLRAREEQEQKQKEEQAQAQELEKEKERELEKDRELEKDRELEKERELEKERELEKERELEKERELEKERELEKERELEKERELEKERELEKEKELEKERELEKERELEKERELEKERELEKERELEKERELEKERELEKERELEKERELEKERELEKEKELEKERELEKERELEKEKELEKEREREKELEKERELEKEKELEKEREREKELEKEREKEKERELEKEKEKEKEKEKEQQGASNSLKRGAADDDDDEPSGRSSKRSKHTPEDNPTQNPALSPNKKRKTPPPDTEPKPAKRAKGEPATRSSERQRKAAEKAEAAQEAEAAQEAEAAQEAEAAQEAEAAEEVEAAEEVEAAEEVEAAEESDDDVEELTWRDSRRARFRAMRKADLIEECRRRLIAGPGDEHRTLTYRAEKTVEGLIDALMWYDEPEGYEEDLEEKGWEELKEMCKTTYKLYYSGKKVEVMRDRLRWFYAEQQRHVRALIEQEEIPPDWKEQDEVEDEDEDEDEDEDDDDEEEEEDEEDEDEDEESSEEVSEEP

SEQ ID NO: 12398 - protein, 356 aa, Xanthomonas axonopodis pv. citri str. 306
MHQPRSLDHYRLLGRSGLRVSPLSLGTMTFGEAWGWGADAVEAKRIFDAYADRGGNFIDTAVNYTNGGSERILGELIKDRRERFVLATKFTMARDADNINSGGNHRLNLIRSVETSLRQLATDRIDLLYLHAWDFTTAPDEVMRGLEHLVQSGKVLYLGICNTPAWRVAQLQTLADLRGWSPLVALQIEYSLVERSVEHELLPMARELGLGVLPWSPLGGGILTGKYSRADLTDDNAAEVSSSRKGVIASTGHLNARSLEIADVVGAVADELGASRSQVALAWTLRNPAVVSPVMGARTLQQAEDNFGALEIVLADEQLARLDAVSAVPPIFPERFIGRPMAQQLIYGSHHVQLRT

SEQ ID NO: 12399 - protein, 234 aa, Zea mays
TRKTWFDDKPNDGTAAHVISRGGPVERGQIDEEGIREGEDLHRGLKARQISMIAIGGSIGTGLVIGSGSGLAKGGPVGLLIAYVIMGAMCFGVMCSLGEMATYLPHKKGFGGYASRFVDPSMGFALGWNYLMKYLVVTPNNITAGAIVVRYWTDKVPIGAWITIYIGGCFLVNLLGIEVFGEVEFWASFIKIIVLAGLILLGIIIDLGGAVVDRIGFRYWRGQPFSHYIFQNDT

SEQ ID NO: 12400 - protein, 491 aa, Musa acuminata
GTRRDRERERERERERERERERERERERERERERERVHLLGSSSLHRSLWELSKKHGPLMHLKFGRVPVVVVSSPEMAKEVLKTHDLECCSRPSLLSFSKFSYGLSDVAFIPYGERWRQLRKLCTVELLSTRKINSFRDIRKEEMERVTKLICSHVRASSMVNLSELLLSLSCNMTCRSAFGSGFDDGGDIQLHDMLREAQEELSGLFLSDYLPLLGWVDRLSGMRSRLERAFLKLDSIYQRRIDYHQDRLRQQGKEDGDVLDALLRMQKDEEGLTEDHIKGVLMDIFIAGTDTSSATVEWAMAELIRQPELMKRAQDEVRRCVGSKGEVEESDLHQLHFFKCVIKETMRLHPPAPLLLPRETMQHFKLNGYDILPKTWMYVNAWAIGRDPNSWGRPHVFDPERFMHDSTEASGQDFKLIPFGEGRRICPGKNLGMLMVELVLANLLYSFDWHLPPGMVKEDISMEEAPGVPVHREYALCLMATKYDATTA

SEQ ID NO: 12401 - protein, 250 aa, Hevea brasiliensis
MTKNYPKVSEEYQKAIDKAKRKLRGFIAEKGCAPLMLRIAWHSAGTYDANTKTGGPFGTMRHAAEQAHAANNGLDIAVRLLEPIKQQFPILSYADFYQLAGVVAVEITGGPEIPFHPGREDKPEPPPEGRLPNATKGADHLREVFGKTMGLSDKDIVVLSGGHTLGRCHKERSGFDGPWTANPLIFDNSFFTELLAGQKEGLLQLPTDTVLVTDPVFRPYVEKYAADEDAFFADYAEAHVKLSELGFAEA

SEQ ID NO: 12402 - protein, 619 aa, Candida tropicalis
MSEQNQGQPDQQHSGDHQHHHHHHHHHHHSQQPAQPIPIDPNVNPANRIGRYQIIKTLGEGSFGKVKLAQHVGTGQKVALKIINRKTLAKSDMQGRVEREISYLRLLRHPHIIKLYDVIKSKDEIIMVIEFAGKELFDYIVQRGKMPEDEARRFFQQIIAAVEYCHRHKIVHRDLKPENLLLDDQLNVKIADFGLSNIMTDGNFLKTSCGSPNYAAPEVISGKLYAGPEVDVWSSGVILYVMLCGRLPFDDEFIPALFKKISNGVYTLPNYLSPGAKHLLTRMLVVNPLNRITIHEIMEDEWFKQDMPDYLLPPDLSKIKTSKIDIDEDVISALSVTMGYDRDEIISVIEKANREAAAGGATPTNQSKSTNEVLDAYLLMKENHTLVKDLKKSKSENIESFLSLSPPPSSSFPNPGSTSSAPGVQQSLTYQTLATVPDLSTLPNSTIAILPTSLPSIHRAYMMETKVNDPQQQIPAPQPTKKLKTRWHFGIRSRSYPLDVMGEIYRALKNLGAEWAKPTEEELWTIRVRWKYDSTPQLRVWQRTNLMKMQIQLFQLEPNNYLVDFKFDGWEQTSDESKNDASLDYKQQDLDEVGSFSAYPFLHLATRLIMELAVNSQSG

SEQ ID NO: 12403 - protein, 532 aa, Sorghum bicolor
MSIKSETNERSSTIQSAGHRICSIVKLCYQHLMLAVSYALYLFLAPIILATLVLHLSRHTSADDDLIVSARSTLTANLPFTVVVVAAAATAVYLMRRPRAVYLLDLACYKPGAEHAVTRETFMRLVVGYGTFSDDSLAFQRKILERSGLGQGTYLPKALTSSPPNPCMAEARREAEAVMFGAVDQLLAKTGVRAGDIGIVVVNSGLFSPTPSLSAMIVHHYKLRRDVSSYNLAGMGCSASLISVDLAKQLLQVQRNTYALVVSLEIMAASAYVGNTRSMLVPNCIFRMGGAAVLLTNHGTERRRAKYQLLHTVRTHQGADDRAYRCVYQEEDESGHVGVALSKDLMSVAAEALKTNITTLGPRVLPMSEKMKMMLVGGKAAVVQVLGVQQQGQGGSRSRPYIPDLTTAFEHFCIHAGGRAVLDTVERSLDLSAWHMEPSRMTLYRWGNTSSSSLWYELAYTEAKGRVRRGHRVCQIAFGSGFKCNSAVWRALRTIDPAKESAAAGNPWVEEIHRFPVEVPQVERVDVAAMAS

SEQ ID NO: 12404 - protein, 509 aa, Zea mays
MALAPSPPALPPNPALPLPWWGRAGRGALVRARARAVRAALRPPSQWSVGSWRGRPAQQQPEYPDKADLEDVLRTVGTFPPIVFAGEARTLEERLAEAAVGRAFLLQGGDCAESFKEFNANNIRDTFRVLLQMSVVLMFGGQMPVVKVGRMAGQFAKPRSDGFEERDGLKLPSYRGDNINGDAFNGESRLPDPHRMIRAYSQSAATLNLLRAFATGGYAAMQRVAQWNLDFTENSEQGDRYMELAHRVDEALGFMSAAGLPLDHPIMTTAEFWTSHECLLLPYEQALTREDSTTGLYYDCSAHFLWVGERTRQLDGAHVEFLRGIANPLGIKVSDKMDPAELVRLIDILNPENRAGRITIITRMGPENMRVKLPHLIRAVRGAGQIVTWVTDPMHGNTMKAPCGLKTRSFDRILGEVRAFFDVHEQEGSHPGGVHLEMTGQNVTECIGGSRTVTFDDLGSRYHTHCDPRLNASQSLEMAFIIAERLRKRRMASSPLYTNQLGSIPSMGL

SEQ ID NO: 12405 - protein, 556 aa, Zea mays
MSLISQNAVQKRCLRKSEADNCNDEDIGSPTSIDAEVGKEAKLKNHNKERKKKKTKLLESQQNKEEEEMRQLESSLFGSLYAPLEFGTEVGAAVAPDRDAPLFFTDRSAGGGMDYFPTYEEDMAHEDEEDMVGIKRRKPVWVDEEEEMTEVDIVKVPRLRKLRKEEDEHLISGKEYEARLRGQHAKLNPFTGWADMDQKTSLPAASDGESDDEGCVDDILRNNDELVAKDTVKLLPGMLEFSRLVDANIQDPSSGPINSVQFHRNGQLMLAAGLDKHLRFFQIDGKRNPKIQSIFIGDCPVHKASFLPDGSEVILSGRRKFFYSFDLVNAAVSKIGPLTGREEKSLETFEISPDSRTIAFVGNEGYILLISAKTKQLITTLKMNGSVRSLAFADGGNQLLSSGGDGHVYHWDLGTRKCIHKATDDGSLAGLSLCTSRDSSLFATGSSSGIVNVYKRDDFLGGKRKPLKTIENLTTDIGEMKFNHDAQILAISSRKERNGMRLVHVPSFSVFQNWPGPRFSLHYPRCLDFSPGSGFLSVGHAGGKVLLYKLHHYENA

SEQ ID NO: 12406 - protein, 395 aa, Oceanobacillus iheyensis HTE831
MTGTSGFVYSADYLKYHFHENHPFNQKRVLLTKELLEAHQVLSNHDLISPRLATEEELLLFHHPNYMETVKRAGSGEITEESALEYGIGTEDTPAFFQMHEAASYLVGGTLAAVDAVLNNNYTHALNLGGGLHHGFRSRASGFCIYNDSAVAIKYIRKHTNFKVLYVDTDAHHGDGVQSAFYDDPNVCTFSIHETGRYLFPGTGNINERGIKEGHGYTFNLPIDAFTQDESFLALYETAFKEIAAFFKPDIIVTQNGVDAHCLDPLTHLCGTMRIFEEIPRIAHELAHEYCDGKWIAIGGGGYDMWRVIPRAWGQIWNVMKNNKVSYGELPTTWLEKWQEQSSVELPHLWQDLEDIQPYIPRKDEITEKNYQLLQSLLKYTKPINYSNNLSAKQK

SEQ ID NO: 12407 - protein, 84 aa, Zea mays; identical to SEQ ID NO: 2446

SEQ ID NO: 12408 - protein, 256 aa, Burkholderia fungorum
MGDSMDLELRGRTALVTGASTGIGTGIARALASEGVRLAITARRDALLEEVAASIVAEGGVRPIVIVGDLTAPGHIERILAQATDALGQIDILVNNAGASRPAPLDSGEDVWEEAFALNFTAARRMTHAVLPAMRSRKWGRVINISGSMEPRGLNPSGPAKAALHLWAKSLSREIAADGITINTIPPGRIHSEQIEKRLHPTEESKQAFIARNVPIGYFGDPLDIGYLAAFLASPRARYITGDVIPVDGGMHFYAH

SEQ ID NO: 12409 - protein, 149 aa, Macrocystis pyrifera
MADQLTEEQIAEFKEAFSLFDKDGDGTITTKELGTVMRSLGQNPTEAELQDMINEVDADGNGTIDFPEFLTMMARKMKDTDSEEEIIEAFKVFDKDGNGFISAAELRHIMTNLGEKLTDEEVDEMIREADIDGDGQINYEEFVKMMMAK

SEQ ID NO: 12410 - protein, 247 aa, Pseudomonas syringae pv. tomato str. DC3000
MSLQGKVALVTGASRGIGQAIALELGRNGAVVVGTATSESGAERISATFKESGIEGFGLMLDVCDAESVSSVLSTIQERVGAPLILVNNAGITRDNLVMRMKDDEWYDVVNTNLNSLFRLSKGVLRGMTKARWGRIISIGSVVGAMGNAGQVNYASAKAGLEGFSRALAREVGSRAVTVNSVAPGFIDTDMTRELPEAQRESLITQIPLGRLGQAEEIAHVVAFLASEGAGYVTGATIPVNGGMYMS

SEQ ID NO: 12411 - protein, 500 aa, Mesembryanthemum crystallinum
MDTGGNSLPSGPDGVKRKVSYFYDPEVGNYYYGQGHPMKPHRIRMTHALLAHYGLLQHMQVLKPVPARDRDLCRFHADDYVSFLRGITPEMQQDQLRQLKRFNVGEDCPVFDGLYSFCQTYAGGSVGGAVKLNHGLCDIAINWAGGLHHAKKSEASGFCYVNDIVLAILELLKVHERVLYVDIDIHHGDGVEEAFYTTERVMTVSFHKFGDYFPGTETFVYIGYGKGKYYSLNVPLDDGIDDESYQSLFKPIMGKVMEIFKPGAVVLQCGADSLSGDRLGCFNLSIKGHAECVKYMISFNVPLLLVGGGGYTIRYVARCWCYETGVALGFELDDKIPQHEYYEYFGPDYTLHVAPSNMENKNSRPMLDDIRGKLLEYLSSLQHAPSVQFQERPPEAEIPEEDEDQHDPEGRWDPDSDMEVDDRSISIRSRVKREIMEPDLKDRDDVKDAVDHPRDMDVSYGAGNTSVKAPTTSSDQPEGCVEMEQDNSNRPPDQGPNMNS

SEQ ID NO: 12412 - protein, 178 aa, Bacillus licheniformis
METLYTERLTLRKMELEDADVLCQYWSDPEVTKYMNITPFTDVSQARDMIQMINDLSLEGQANRFSIIVKETDEVIGTCGFNMIDQENGRAEIGYDLGRNHWGKGFASEAVQKLIDYGFTSLNLNRIEAKVEPENTPSIKLLNSLSFQKEGLLRDYEKAKGRLIDVYMFSLLKREYAG

SEQ ID NO: 12413 - protein, 332 aa, Glycine max
MAAIFSSSLFVSSPLPKPLSSSYSRIHKAPQLFRARSSLLQDKEEKVIVQDSFPSKTSPLHSADKSTSGNSINTSAFEKRIIKVEQSVNIFLTDSVIKILDTLYHDRHYARFFVLETIARVPYFAFMSVLHMYESFGWWRRADYLKVHFAESWNEMHHLLIMEELGGNAWWFDRFLAQHIAIFYYIMTVLMYAVSPRMAYHFSECVESHAFETYDKFIKVQGDELKKMPAPEVAVNYYTGDDLYLFDEFQTSRVPNSRRPKIENLYDVFVNIRDDEAEHCKTMKACQTHGNLRSPHSYAEDDDSSVCALEADCEGIVDCIKKSVTSNAAKVK

SEQ ID NO: 12414 - protein, 328 aa, Streptomyces coelicolor A3(2)
MEQRHLGRTGLRVSRIGLGTLTWGRDTDEHDAADLLKTFWEAGGTLVDTADVYGDGESEYLLGRLMEGLVPRRDLVISTKAGSVPDPDRRFDGSRAHLLSALDASLARLGTDHVDVWHLHAFDPHTPLEETLHALDVAVGSGRARYAGVSNFCGWQLAKAATWQLAAPGVRNRVASTQMEYSLLQRGVEREVLPAALDLGIGLLPSSPLGRGVLTGKYRKDATPMDSRGASDHLAPFVEPYLDDTAGHIVDAVATAADGLAVTPLQVALAWVRDRPGVVAPIIGPRNAQQLTAALSVETLSLPDEICRALDDVSAPVHRYPDHDWSTL

SEQ ID NO: 12415 - protein, 437 aa, Brassica napus var. napus
  unsure (1)..(437): unsure at all Xaa locations
MKGVRKTYDNSYTLSSLFVFFVLIILRPIFSTTTLSSTESLTISSNRTLVSPGNIFELGFFNTTSSSRWYLGIWYKKISERSYVWVANRDNPLSNAAGTLKISGNNLVLLGHSNRSVWSTNLTRENERSPVVAELLANGNFVMRDTNTTXSSRFLWQSFDYPTDTLLPEMKLGYEPKTGLNRFLTSWRSSDNPSSGDFSYKLEARRLXELYLSSGIFRVHRSGPWNGIRFSGIPDDKKLSYLVYNFTENSEEVAYTFLMTNKSIYSRLTVSFSGYLERQTWNPTLGMWNVSWSLPFDSQCDSYRMCGPYSYCDVNTSPICNCIQGFIPSNVEQWDQRVWANGCIRRTRLSCSGDGFIRMKNMKLPETTMATVDRSIGVKECEKKCLSDCNCTAFANADIRNGWTGCVFWTGRLDDMQNYVTDHGQDLYVRLAAADLV

SEQ ID NO: 12416 - protein, 374 aa, Perrottetia ovata
ALSIAGAVQSQKLAVRAISQLQSLPGGDIKLLCDAVVENVRNLTGYDRVMVYKFHEDGHGEAVAESKRPDLEPYIGLHYPATDIPQASRFLFKQNRVRMIVDCHSTPVSVIQDDGLMQPLCLVGSTLRAPHGCHAQYMANMGSIASLAMAVIINGNDEDGIGGRNTTRLWGLVVCHHTSARSIPFPLRYACEFLMQAFGLPLNMELQLASQLLEKHVLKTQTLLCDMLLRDSPTGIVTQSPSIMDLVKCDGAALYHQGKYYPLGVTPTEAQIKDIVEWLLAFHGESTGLSTDSLADAGYPGAALLGDAVCGMAVAYITDRDFLFWFRSNTAKEIKWGGAKHHPEDKDDGQRMHPRSSFKAFLEVVKSRSLPWEN

SEQ ID NO: 12417 - protein, 125 aa, Zea mays
MVDAWWSLLGAAFPALVAGQFIRTKRRRDEEQRLKAARGREKSSDEVFVCERVCTSKRMLNKVGAFSKDPIPETCVTVCGVSELDACADACARTVCVNQHQVPNWNDVCLKRCQSECLKLSSTLM

SEQ ID NO: 12418 - protein, 323 aa, Xylella fastidiosa Dixon
MTVLVTGAAGFIGAHVCRVLAARNDTVVGLDNYNAYYDPQLKRDRVTALCPDVHIRTLDLTDRERCAALFNEVQPDRVVHLAAQAGVRYSIENPHAYVDSNLVGFLNVLELCRHCRVQHLVYASSSSVYGDSAIPPFSEQQRVDQPRSLYGATKVANEVMAYSYAQLYGLRATGLRFFTVYGPWGRPDMAPLIFSRAVLEGRPIEVFNHGRMERDFTFINDIVAGVIGALDAPGEQAVPHRLFNLGNHTPVSLEHFIKVIEQAAGRPADKHYKPMQLGDMMATMADIAAARAAFGFEPVTSIEIGMPQVVEWCRHYFDTRAST

SEQ ID NO: 12419 - protein, 365 aa, Ralstonia metallidurans
MHRRCSIACMKRCPTPWPNNSTPRGNTTPLARPIPREPIMAELHMVEAVNLALAHALANDPDVVLLGEDIGVNGGVFRSTVGLQSRFGEARVIDTPLAEGAIVGAAIGMAAMGLKPVAEIQFAGFIYPAIDNILNHAGHMRHRTRGRITCPMVVRAPSGAGIHAPEHHSESPEALFAQMPGIRVVMPSSPARAYGLLLAAIRDPDPVIFLEPTRLYRLFRQEVADDGQALPLDACFTLREGTDLTLVSWGAMLRETLAAADVLADDGVSAAVIDVATLKPLDMETILESVAQSGRCVIVHEAPRTAGLGAEIAANLADAGLYSLSAPVQRVTAPDTVVPLARLEHSYMPSVARIVDAARRALEAA

SEQ ID NO: 12420 - protein, 214 aa, Paeonia lutea
IVESVGEGVTDVKPGDHVLPIFTGECKECRHCKSEESNMCDLLRINTDRGVMLNDGKSRFSINGQPIFHFVGTSTFSEYTVLHVGCLAKINPEAPLDKVCVLSCGISTGLGATLNVAKPKKGSTVAIFGLGAVGLAAAEGARIAGASRIIGVDLNPKRSDEARKFGVTEFVNPKDYNKPVQEVIAEMTGGGVDRSVECTGSIMAMMSAFECVHD

SEQ ID NO: 12421 - protein, 393 aa, Panicum capillare
EPARTEAPALSIAGAVQSQKLAVRAISRLQALPGGDVKLLCDTVVEHVRELTGYDRVMVYRFHEDEHGEVVAECRRDNLEPYLGLHYPATDIPQASRFLFRQNRVRMIADCHATPVRVIQDPGLSQPLCLVGSTLRAPHGCHAQYMANMGSIASLVMAVIISSGGDDEQTARGGISSAMKLWGLVVCHHTSPRFIPFSLRYACEFLMQAFGLQLNMELQLAHQLSEKHILRTQSLLCDMLVRDSPTGIVTQSRSIMDLVKCDGAALYYHGKYYPLGVTPTESQIKDIIEWLTVCHGDSTGLSTDSLADAGYHGAAALGDAVCGMAVAYITPSDYLFWFRSHTAKEIKWGGAKHHPEDKDDGQRMHPRSSFKAFLEVVKSRSLPWENAEMDAIH

SEQ ID NO: 12422 - protein, 333 aa, Bradyrhizobium japonicum USDA 110
MKTAITELFGIEHPIIQGGMHFVGFAELAAAVSNAGGLGIITGLTQKTPELLAKEIARCRDMTDKPFGVNLTFLPAFSAPPYPEYIAAIVEGGVKAVETAGRSPEQYMPALKAAGIKVIHKCTSVRHSLKAERIGCDAVSVDGFECGGHPGEDDIPNMILLPRAAEELKIPFVASGGMADGRSLVAALSLGAAGMNMGTRFIATKEAPVHQNVKNALVAATELDTRLIMRSLRNTERVLKNANVDRLLEIEREKGDKLTIDDIHDQVAGVYPRIMLDGQMDAGAWSCGMVAGLIHDIPSCKELVDRIMSEAETIIRGRLMGFLDGTGATRKVA

SEQ ID NO: 12423 - protein, 347 aa, Coccidioides immitis
AEKIAKFPGTKGPDGKYTVTLIEGDGIGPEISQSVKDIFSAAKVPIKWEPVDVTPILKDGKTAIPDEAINSVKKNYVALKGPLATPVGKGHVSLNLTLRRTFNLFANVRPCRSIAGYKTPYDNVNAVLIRENTEGEYSGIEHVVVDGVVQSIKLITREASERVLRFAFQYAQEVGKPKVRAVHKATIMKMSDGLFLRTAKEISKEFPDIEFDAELLDNTCLRMVTDPAPYNDKVLVMPNLYGDILSDMCAGLIGGLGLTPSGNIGNECSIFEAVHGSAPDIAGRALANPTALLLSSIMMLRHMGLNDHAKKIETAIFETLAEGKTLTGDLGGKAKTHEYAGAIIKRL

SEQ ID NO: 12424 - protein, 654 aa, Ralstonia metallidurans
MQESSATTFPRCLLAHATQRPDHPAYREKDLGIWQTYGWSQTANEVRALACGLAALGFRRGMNLAVVGDNRPRLYWAMTAAQALGGIPVPLYQDAIANEMIYVLDDAEIEFAIVEDQEQVDKLLEVESQLAARGRAVRHLIYEDPRGLRDYDHPSLLSYERVQEIGREFDRANPGFFDAAVQAGAPEDTAIILYTSGTTGKPKGVCHSHAGLIGSARNGCKFDGLGADDDVLSYLPMAWVGDNLFSYAQALVAGFTVNCPESRETVMTDLREIGPTYYFAPPRIYEGLLTQVMIRMEDAGWIKRRLFQWAMNVARRCGADILDKRPVATLDRLRYALGEALIYGPLRNVLGMSRIRVGYTAGEAIGPDLFRFYRSIGINLKQFYGQTETCAYVCLQPDGQVKFDTVGPAAPGMEIRIAENGEVLVRGVGLLKNYYKRDDATREAINDEGYFLTGDAGVIDADGHLKIIDRAKDVGKLADGSMFAPKYIENKLKFFPYIKEAVAFGTDRDRVCAFINIDFDAVGNWAERRHLPYAGYVDLAAQPDVIAMIAECVEQVNADLAADAMLAGSQIARFLILHKELDPDDDELTRTRKVRRGFIAEKYGVLVEALYAGKPEQFIETRVKFEDGREGSVSATLKLVDVKRFPPVGGARAA

SEQ ID NO: 12425 - protein, 397 aa, Pyrococcus abyssi
MEIGVVGKPNVGKSTFFSAATLVDVEIANYPFTTIDANVGVTYAIAEHPCKELGCKPNPQNYEYREGLALIPVKMIDVAGLVPGAHEGRGLGNKFLDDLRMASALIHVVDVTGKTDAEGQPTENHDPIEDIEFLEREIDYWIYGILSKGWDKFAKRIKLQRIKLESAIAEHLSGIGVTENDVWEAMHRLGLPSDPTLWSQEDLLAFASEIRRINKPMIIAANKADAASEEQINRLIKEGEKRGYIVVPTSAAAELTLRKAAKAGFIDYIPGSSEFKILKDMNERQKKALLMIKEKVLDRFGSTGVQEVINKAVFELLNLIPVYPVQDENKLTDQFGNVLPHVFLMKKGSNPRDLAFKVHTDLGRGFLYAINAKTKRRIGEDYELQFNDIIKIVAVTK

SEQ ID NO: 12426 - protein, 473 aa, Glycine max
  unsure (1)..(473): unsure at all Xaa locations
MPLSVPARARIHHLHGPSFFPSISKPKQKPIWPTLLPLNRAFGCRSLEIAVPSPSSSLPSNVGPNSWKHVDVATLSNLCVDIVLNVPQLPPPSPLQRKAFMDRLAQSPPDKKYWEAGGNCNMAIAAARLGLNCISIGHVGNEIYGKFLSDVLRDEGIGLVGMITNDDIVNSSSGSASCETLLCWVLVDPLQRHGFCSRADFCEEPILHWMSKLSSEVKMAIKNSKXFLFCNGYGFDELSPGAILSAMEYAVEVGTSIFFDPGPRGKSLSTGTPDEQRALNQLLRMSDVLLLTSEEAEELTGINDPILAGQEFLKRGIRTKWVIVKMGSKGSILITASSVACAPAFKVNVIDTVGCGDSFVAAIVYGFIHNMPLVNTLAIANAVGAATAMGCGAGRNVATLENVVHILRSSNLSEDDEFWIEILEKNVVAQEITYLSNVMNGNKNRLNLVSFDKVASELLPKLELPQTVGNAPT

SEQ ID NO: 12427 - protein, 140 aa, Glycine max
MVSFEMNDRKKIGLGLTGFGIFFSFLGIIFFFDKGLLAMGNVLFVSGVSITIGLKSTMQFFMKRSNFKGTISFGVGFFILIMGWPIVGMIVEAYGFVVLFSGFWPTLAVFLQKIPVLGWLFQQPFVRSLFDRYRGKRMPV

SEQ ID NO: 12428 - protein, 208 aa, Zea mays
SFPSSGRQSFYRNPIKEVVRFLDKKHRNHYRVYNLCSERAYDPKHFHNRVVRIMIDDHNVPTLHQMVVFTKEVNEWMAQDLENIVAIHCKGGTDRTGTMVCAFLIASEICSTAKESLYYFGERRTDKTHSEKFQGVETPSQKRYVAYFAQVKHLYNWNLPPRRILFIKHFIIYSIPRYVRDLKIQIEMEKKVVFSTISLGKCSVLDNI

SEQ ID NO: 12429 - protein, 296 aa, Listeria ivanovii
MKKNNWLQNVVVAMLVLIVGLCISTGSGTKVQAASILRPMPINQVFPDPGLANAVKQNLGKQSVTDLVSQKELDGVQNFNGDNSNIQSLAGMQFFTNLKELHLSHNQISDLSPLKDLTKLEELYVNRNKLKNLNGIPSACLARLFVDNNELRDTDSLIHLKNLEILSIRNNKLRSIVALGFLSKLEVLDLHGNEITNTGGLNRLKKVNWIDLTGQKCVNEPVRYQPELYITNTVKDPDGRWIAPYYISNNGKYVDGCDMWELPVYTDEVSYKFSEYISVGETEAIFDGTVVQPLRN

SEQ ID NO: 12430 - protein, 273 aa, Glycine max
  unsure (1)..(273): unsure at all Xaa locations
AQICACDCFRHRWTVRYEAHLWDKNCWNESQSKKGRQATSLFCSLLSPYKAAARDNDFAALKYWGQDTILNFPLSNYEEKLKEMEGQSKEEYIGSLRRKSSGFSRGVSKYRGVARHHHNGRWEARIGRVFGNKYLYLGTYATQEEAAAAYDMQENSGRWXTIEYRGLNAVTNFDLSRYINWPRPKTEENHQTIPSNENVNSNAELELGSASDEITEEGVAPSSESNPSRRTFPEDIQTIFENQDSGIYTENDDIIFGDLGSFGAPIFHYELDV

SEQ ID NO: 12431 - protein, 154 aa, Debaryomyces hansenii
MVQAVAVLRGDSKVSGVVNFEQSSESDPTTITWEISGNDANALRGFHVHTFGDNTNGCTSAGPHFNPFTKEHGAPEDDNRHVGDLGNVTTDTSGVAKGSKQDLFVKLIGQNSILGRTVVIHAGTDDLGKGGNAESKKTGNAGARLACGVIGLTN

SEQ ID NO: 12432 - protein, 349 aa, Lycopersicon esculentum
MGVQEKDPLLQLSLPPGFRFYPTDEELLVQYLCKKVAGHDFPLQIIGEIDLYKFDPWVLPSKATFGEKEWYFFSPRDRKYPNGSRPNRVAGSGYWKATGTDKVITSQGRKVGIKKALVFYVGKAPKGSKTNWIMHEYRLFESSRKNNGSSKLDEWVLCRIYKKNSSGPKPLMSGLHSSNEYSHGSSTSSSSQFDDMLESLPEMDDRFSNLPRLNSLKAEKFNLDRLDSANFDWAILAGLKPMPELGPANQAPGVQGQAQGHVNNHIHSDNNNMNFLNDVYAHPPNFRGNTKVESINLDEEVESGKRNQRIDQSSYFQQSLNGFSQAYTNNVDQFGIQCPNQTLNLGFKQ

SEQ ID NO: 12433 - protein, 214 aa, Paeonia humilis
IVESVGEGVTDVKPGDHVLPIFTGECKECRHCKSEESNLCDLLRINTDRGVMLNDGKSRFSINGQPIFHFVGTSTFSEYTVLHVGCLAKINTEAPLDKVCVLSCGISTGLGATLNVAKPKKGSTVAIFGLGAVGLAAAEGARIAGASRIIGVDLNPKRFDEARKFGVTEFVNPKDYNKPVQEVIAEMTGGGVDRSVECTGSIMAMMSAFECVHD

SEQ ID NO: 12434 - protein, 243 aa, Zea mays
  unsure (1)..(243): unsure at all Xaa locations
MAFDAFTDKTAVFRRLKAKPENKMCFDCNAKNPTWASVTYGIFLCLDCSAFHRSLGVHITFVRSTNLDSWTPDQLKMMAFGGNNRAHAFFKQHGWTEGSGKVDSKYTSRAAELYRQILQKEVAKSSTVNVLPSSPVAASQPPNPTDDFPDFKLADAPEETTNGKHEPLVANPPKEPAQAPKAPTHPTYVSSVKKPLGAKKVGAKTGGLGXKKLTTKSNESLYDQKPEEPKPALPXMTTTTSAA

SEQ ID NO: 12435 - protein, 405 aa, Schizosaccharomyces pombe
MGFGKKKVSYFYDEDVGNYHYGPQHPMKPHRVRMVHNLVVNYNLYEKLNVITPVRATRNDMTRCHTDEYIEFLWRVTPDTMEKFQPHQLKFNVGDDCPVFDGLYEFCSISAGGSIGAAQELNSGNAEIAINWAGGLHHAKKREASGFCYVNDIALAALELLKYHQRVLYIDIDVHHGDGVEEFFYTTDRVMTCSFHKFGEYFPGTGHIKDTGIGTGKNYAVNVPLRDGIDDESYESVFKPVISHIMQWFRPEAVILQCGTDSLAGDRLGCFNLSMKGHSMCVDFVKSFNLPMICVGGGGYTVRNVARVWTYETGLLAGEELDENLPYNDYLQYYGPDYKLNVLSNNMENHNTRQYLDSITSEIIENLRNLSFAPSVQMHKTPGDFTFENAEKQNIAKEEIMDERV

SEQ ID NO: 12436 - protein, 589 aa, Pseudomonas sp.
MRSLEALLPFPGRILERLEHWAKTRPEQTCVAARAANGEWRRISYAEMFHNVRAIAQSLLPYGLSAERPLLIVSGNDLEHLQLAFGAMYAGIPYCPVSPAYSLLSQDLAKLRHIVGLLQPGLVFAADAAPFQRAIETILPDDVPAIFTRGELAGRRTVSFDSLLEQPGGIEADNAFAATGPDTIAKFLFTSGSTKLPKAVPTTQRMLCANQQMLLQTFPVFGEEPPVLVDWLPWNHTFGGSHNIGIVLYNGGTYYLDDGKPTAQGFAETLRNLSEISPTAYLTVPKGWEELVGALERDSTLRERFFARMKLFFFAAAGLSQGIWDRLDRVAEQHCGERIRMMAGLGMTETAPSCTFTTGPLSMAGYIGLPAPGCEVKLVPVDGKLEGRFHGPHVMSGYWRAPEQNAQAFDEEGYYCSGDAIKLADPADPQKGLMFDGRIAEDFKLSSGVFVSVGPLRTRAVLEGGSYVLDVVVAAPDRECLGLLVFPRLLDCRALSGLGKEASDAEVLASEPVRAWFADWLKRLNREATGNASRIMWVGLLDTPPSIDKGEVTDKGSINQRAVLQWRSAKVDALYRGEDQSMLRDEATL

SEQ ID NO: 12437 - protein, 82 aa, Zea mays
MQSSSMKREISEAHDTIRFGINAGVKADLAPPHPLQSTIQSETKFWAGGGKFGTYAIYGSALPIRKDLDARVLSRFRRPPGA

SEQ ID NO: 12438 - protein, 446 aa, Corynebacterium efficiens YS-314
MFMGAGKTISLAGPSVILVYAIIGFMLFFVMRAMGELLLSNLNYKSLRDAVSDILGPGAGFVTGWTYWFCWIVTGMADLVAITGYVQYWWSGVPLWLPGAGAILLLFVLNLAAVRLFGEMEFWFAIIKILAIVALIFTGLVMVVSHFESPDGSVAQFSNLVDHGGFFPNGITGFLAGFQIAIFAFVGIELAGTAAAETEDPVRTLPRAINSIPVRIVVFYVLSLAVIMMVIPWDRVHTDSSPFVQMFALAGLPAAAGIINFVVLTSAASSANSGIFSTSRMLFGLSLEGAAPRRWAKLSANQVPARGLLFSIVCLIPGVAVMYAGSSIIEAFTLITTVSSVLFMVVWAYILVAYIVYRRRNPQLHAASVFKMPGGVAMAVVVLVFFVGMVGVLTLENDTRSALLATPVWFLILGAGWWFSGGARGAASRSQLTGPTTPVTPATTAS

SEQ ID NO: 12439 - protein, 143 aa, Zea mays
LTFCQAQWINFHVPKQGICEDRTLEFYLVTYDDIGGVTCRRFRDTQSQNSGYSPVFWTTDTTFLEPPFSEQELVNYASRDHIQGVTSNHAGAENRVVSRILRINSSYDVVDTHLSTPLDDGRSVEGRIWLYEDGTFRFWICWQ

SEQ ID NO: 12440 - protein, 187 aa, Lactococcus lactis subsp. lactis
MFMVNINLVLAEHQTLQTERLILRKLQLEDAPEMFNYASNPEVARFTSFEPHDSLETTRATIAKFFLPNSLYHWGIVEKTSGQLIGEIFLNPINEKTVELGWILNQDHWGKGIMPEATECLLALSFDKLEVKVIQAKHFTENAKSGRVMEKLGMKHLGKVYSYFPKFKNPLLTDYWAITKDEYDLLH

SEQ ID NO: 12441 - protein, 317 aa, Zea mays
  unsure (1)..(317): unsure at all Xaa locations
MTRRCSHCSHNGHNSRTCPNRGVKIFGVHLTDGSAIRKSASMGNLSLLSAGSTSGGASPADGPDLADGGGGYASDDFVQGSSSASRDRKKGVPWTEEEHRRFLLGLQKLGKGDWRGISRNFVVSRTPTQVASHAQKYFIRQSNMSRRKRRSSLFDMVPDESMDLPPLXPGKSEPETSMLNQPPLPPAVEGGGGNHGVRILLLVAESSGASALMRESLQPTYPMIVPAYFSPFLQFSVPFXPNQEDGGDLPQETHEIVKPVAVHSQNPINVDELVGMSKLSIWEHGQETVSTSLSLNLLGGQNRQSAFHANPQTRAQA

SEQ ID NO: 12442 - protein, 328 aa, Agrobacterium tumefaciens str. C58 (U. Washington)
MMKKKVLVVGGAGYIGSHTCLLLSERGYEPVVFDNLSNGHEEFVRWGPFEQGDIRDRARLDEVFAKHRPEAVLHFAALIEVGESVKQPVAFYDNNVIGSLNLLSAAIDAGVTSFVFSSTCATYGLPEQVPIDETHRQAPINPYGRTKWVVEQALKDYSTYEGLRSVMLRYFNAAGADFEGRIGEWHKPETHAIPLAIEAALGRRQGFKVFGTDYDTRDGTCVRDYIHILDLADAHVRAVDYLLDGGETVELNLGTGTGTTVKELLAAISEVSGRPFPVEYTGRRDGDSTTLVANNDKAREVLGWEPRYSLSDIIKSAWAWHSSRNAGD

SEQ ID NO: 12443 - protein, 321 aa, Shigella flexneri 2a str. 301
MGKAVIAIHGGAGAISRAQMSLQQELRYIEALSAIVETGQKMLEAGESALDVVTEAVRLLEECPLFNAGIGAVFTRDETHELDACVMDGNTLKAGAVAGVSHLRNPVLAARLVMEQSPHVMMIGEGAENFAFAHGMERVSPEIFSTPLRYEQLLAAREEGATVLDHSGAPLDEKQKMGTVGAVALDLDGNLAAATSTGGMTNKLPGRVGDSPLVGAGCYANNASVAVSCTGTGEVFIRALAAYDIAALMDYGGLSLAEACERVVMEKLPALGGSGGLIAIDHEGNVALPFNTEGMYRAWGYAGDTPTTGIYREKGDTVATQ

SEQ ID NO: 12444 - protein, 222 aa, Triticum aestivum
  unsure (1)..(222): unsure at all Xaa locations
MSYTTRKVGAANTLEHRXVYIEKDGQLVSPWHDIPLYANEQQTILNMVVECAPLXTNAKIEISKEEQLNPIKXDTKKGKXLRFVRKLLSPNKGLPFGNYGAFPSNFGEGPQTGFFQPQGRTQRAKGVXTNDPLDVCEIGELVAKPGEVIQVKVLXVHGSLDEGETDWKIMVINVXDPXAPKLNDSRTSSATLPGFSGHNEWXRIFRSRREPRNSCFPGVETR

SEQ ID NO: 12445 - protein, 157 aa, SYNECHOCOCCUS SP. WH 8102
MAISVSNVTVTTPDGSSKSLGDYSGKVLLIVNVASRCGFTKQYAGLQGLNAAYADKGLAVLGFPCNDFGAQEPGSLEEIKSFCSTTYGADFELFEKVHAMGSTTEPYSTLNQMDPTGDVAWNFEKFLVGKDGTVIARYKSGVDPEELKAPIEAALAA

SEQ ID NO: 12446 - protein, 631 aa, Methanosarcina acetivorans C2A
MTNERVMQLIREAYEKNLTTLDLSENQLTQLPSEITELKNLTTLNLSGNQLTQLPSEIGELKSLTSFDLSVNQLTQLPPEIGELKNLTILNVYRNQLIQLLPEITELKNLTTLDLSLNKLTQLPPEIGELNNLKTLYSSSNQLTQLPLEITKLKNLTELYLSSNLMIRLPLEITELKNLTTLNVYRNQLIQLPSKITELKNLKKLDLSRNQLAQLPPEIAELKNLTTLDLSRNQLAQLPPEIAELKNLTTLDLFENPLISLPPEIVSQGVKAIFTYLKQSKTTENNEAKLIVVGDGKVGKTCLAYRLINDEFLEDVQITEGINISKWEIPAPYSENRKIKLNIWDFGGQEIYHSTHQFFLTNRSVYLLVWNARITKDYTNIYYWLHTLEAFGEDSPIILVMSKMNESDDDLNLKDLKSKFLQIAGYVKIDSKDGKGISNLKEIICETVWNLPLMRVKWVDSWYEVRNELEGIGDNLILYDEFCEICRSRGLDAENIDILDGYLHDLGIILHFKDRIGLKNIVILKPEWATGAFYKILSAKSVLHNEGVLLQNELDRIWDKETYPSAVHSQLMELMNKFELAYELPDKKRYLIPELLPKNEPDYDWDDEENLYFYYSYDSFLPSGIITRTHA

SEQ ID NO: 12447 - protein, 526 aa, Sulfolobus tokodaii
MSQQEVPRLKKGQVSTLGALVEEIAAMAPACDVVAFITSAIAYAFALTPLAFLLATLAMYLEVNTLYHLAKRHASAGGYYGYIANAFGPVPATISGLLYVLYQVTSTAAIPTYIGGAIIPAFLDYYYHIVLPSWLWLPLILVFVIVPITLAIIGIRPQITTLKFASLFEVTFLAVIGAIVIAKAPDNTLAVFNPFAWPQYAKDFAPYGGPGGALGLAMVFSITSFIGYGGSAPLGEEVEHPKQILRALSLGVFIVGAVLTEMAYAIVAGWGVNNLSALTNNPNPDVQTIPGIIVMGLYLGIIGSMGLFLVAMNSAFSDAVAMQSNAGRVYFSMARDNVIPKWFSKIHPKYHTPYRALTFIGIASSISAILTAFAMFAVNGLNPIQALTTTTANANVLQALSDTFEFLTTMALFGMVLTHFLLNASLITLFFRLKEKHKDILHAVLHVLQHYVAPAVATGILGYALYTSISSLVFPEAPAAIVSIVFLAFATGYAIYLKIYKPHVLTQAGKRVNLWAEEGESSARNE

SEQ ID NO: 12448 - protein, 1122 aa, Arabidopsis thaliana
MSGSRPTQSSEGSRRSRHSARIIAQTTVDAKLHADFEESGSSFDYSTSVRVTGPVVENQPPRSDKVTTTYLHHIQKGKLIQPFGCLLALDEKTFKVIAYSENASELLTMASHAVPSVGEHPVLGIGTDIRSLFTAPSASALQKALGFGDVSLLNPILVHCRTSAKPFYAIIHRVTGSIIIDFEPVKPYEVPMTAAGALQSYKLAAKAITRLQSLPSGSMERLCDTMVQEVFELTGYDRVMAYKFHEDDHGEVVSEVTKPGLEPYLGLHYPATDIPQAARFLFMKNKVRMIVDCNAKHARVLQDEKLSFDLTLCGSTLRAPHSCHLQYMANMDSIASLVMAVVVNEEDGEGDAPDATTQPQKRKRLWGLVVCHNTTPRFVPFPLRYACEFLAQVFAIHVNKEVELDNQMVEKNILRTQTLLCDMLMRDAPLGIVSQSPNIMDLVKCDGAALLYKDKIWKLGTTPSEFHLQEIASWLCEYHMDSTGLSTDSLHDAGFPRALSLGDSVCGMAAVRISSKDMIFWFRSHTAGEVRWGGAKHDPDDRDDARRMHPRSSFKAFLEVVKTRSLPWKDYEMDAIHSLQLILRNAFKDSETTDVNTKVIYSKLNDLKIDGIQELEAVTSEMVRLIETATVPILAVDSDGLVNGWNTKIAELTGLSVDEAIGKHFLTLVEDSSVEIVKRMLENALEGTEEQNVQFEIKTHLSRADAGPISLVVNACASRDLHENVVGVCFVAHDLTGQKTVMDKFTRIEGDYKAIIQNPNPLIPPIFGTDEFGWCTEWNPAMSKLTGLKREEVIDKMLLGEVFGTQKSCCRLKNQEAFVNLGIVLNNAVTSQDPDKVSFAFFTRGGKYVECLLCVSKKLDRKGVVTGVFCFLQLASHELQQALHVQRLAERTAVKRLKALAYIKRQIRNPLSGIMFTRKMIEGTELGPEQRRILQTSALCQKQLSKILDDSDLESIIEGCLDLEMKEFTLNEVLTASTSQVMMKSNGKSVRITNETGEEVMSDTLYGDSIRLQQVLADFMLMAVNFTPSGGQLTVSASLRKDQLGRSVHLANLEIRLTHTGAGIPEFLLNQMFGTEEDVSEEGLSLMVSRKLVKLMNGDVQYLRQAGKSSFIITAELAAANK

SEQ ID NO: 12449 - protein, 205 aa, Nicotiana tabacum
MEGTCNNRSHFQTIFLILVVFTSSSFTESVSAARPVAGDTNTEFIRTSCKSTTYPNLCFSSLSSRATAIGVSPQLLAHESLTVSLETAQSTSVTMVELAHGQGMTPREIGAMHDCVEELSDAVVELRKSLGEMKQLRGKDFDLKMSDIQTWVSAALTDEDTCTEGFAGKVMNGKVKTVVRGRILDVAHMTSNALALINSLAAFHG

SEQ ID NO: 12450 - protein, 166 aa, Oryza sativa (japonica cultivar-group)
MNRKPGDWDCRACQHLNFSRRDLCQRCGGPRGAADRGSGGGGDYANFGGRGGSSFGGGFGTGSDVRPGDWYCNCGAHNFASRSSCFKCAAFKDDAAVNSGGAGAFDGGDMSRSRGYGFGSGAVRASRPGWKSGDWICTRSGCNEHNFASRMECFRCNAPRDSGTEV

SEQ ID NO: 12451 - protein, 132 aa, Zea mays
MALEWVVLGYAAGAEAVMLLLLTLPGLDGLRRGMVSVVRSALKPMMSVVPFCLFLLMDIYWKYETRPTCDDEHACTPSEHLRHQKSVMKSQRNALLIAAALLLYWILFSVTQLVVRLDQMQQRVDKLKKRDD

SEQ ID NO: 12452 - protein, 399 aa, Glycine max
LESGFCPSNTSFFYLKVLTLNSLGVLVESHVDLGFLLQALTPSWNSVPLLVGFFTYLAVAGSILPGKLVPGVALLDGTRLHYCCNGLLSLLLLVALLGIGAKMGFVSPTAISDRGLELLSTTFAFSFLVTLILHFSGCKSQSKGSSLKPHLSGNLIHDWWFGIQLNPQFMGIDLKFFFVRAGMMGWLLINLSILMKSIQDGTLSQSMILYQLFCALYILDYFVHEEYMTSTWDIIAERLGFMLVFGDLVWIPFSFSIQGWWLLMNSVELTPAAIVANCFVFLIGYMVFRGANKQKHVFKKNPKAPIWGKPPKVIGGKLLASGYWGIARHCNYLGDLMLALSFSLPCGISSPIPYFYPIYLLILLIWRERRDEARCAEKYREIWAEYRKLVPWRILPYVY

SEQ ID NO: 12453 - protein, 394 aa, Zea mays subsp. mays
  unsure (1)..(394): unsure at all Xaa locations
LGAARRARLPPGEMGWPLVGGMWAFLRAFKSGKPDAFIASFVRRFGRTGVYRSFMFSSPTVLVTTAEGCKQVLMDDDAFVTGWPKATVALVGPRSFVAMPYDEHRRIRKLTAAPINGFDALTGYLPFINRTVTSSLRAWADHGGSVEFLTELRRMTFKIIVQIFLGGADQATTRALERSYTELNYGMRAMAINLPGFAYRGALRARRRLVAVLQGVLDERRAARAKXVSGGGXDMMDWLIEAQDERGRRLDDDEIIDVLVMYLNAGHESSGHITMWATVFLQENPDMFARAKAEQEAIMRSIPSSQQGLTLRDFRKMEYLSQVIDETLRLVNISFVSFRQATRDVFVNGYLIPKGWKVQLWYRSVHMDPQVYPDPTKFDPSRWEGHSPRAGTFL

SEQ ID NO: 12454 - protein, 809 aa, Malus x domestica
MGIVTLPPLPPPPPKGNLHHRHHSIDSENYSNPPNSMSQDYHQGIFTFSNGFERSAMTTHQEQQQQQQHHLAQQIRREKLRVQGFETPPPPPLVGLNEEESSGLPAYETAGMLSEMFNYPPGGGPVGAAELLEHPMSANYRMMPRPQQAAAVSAAADWYGRVGGGGLGPLGDSKNQHHHQISTINADSAAAMQLFLMNPSQPRSPSPPPSHTTSSTLHMLLPNPSTTTNSLQGFAAASGGGAFGQFTWVPESHQGHEAGGNTAGGGGEIGGVVEGQGLSLSLSTSLQHLEAAKAEEFRMGSDSASGLLYYNNQGDHQHQGSNPQYKNLGSHHHQALHSLQQGGVVGGHHVSFGSSSSFGVVNVLRNSKYVKAAQELLEEFCSVGRGQLKKNKFGGSTSGRQNTTTNPSSNPASGGGGDGGASSSSSKDVPPLSAADRIEHQRRKVKLLSMIDEVDRRYNHYCEQMQMVVNAFDLVMGFGAAVPYTALAQKAMSRHFRCLKDAIAAQLKHSCELIGEKDGAGTSGITKGETPRLKLLEQSLRQQRAFHQMGMMEQEAWRPQRGLPERSVNILRAWLFEHFLHPYPSDADKHLLARQTGLSRNQVSNWFINARVRLWKPMVEEMYQQEANEEEEVGEGGVGGATSAAADQERERNSNAGLAAQTPTPTTTTTTTTKNSPASKRSDINASENDPSLVAINRHQQQQHHHPMMATTTSTTVASPAYQCFPAAASDDTCRSYGTTSANANIAAHHDHQNSSNIDSSTTLISFGTTTAAGDVSLTLGLRHAGGGGGNNMPDKTSSSFSIRDFGGC

SEQ ID NO: 12455 - protein, 379 aa, Shewanella oneidensis MR-1
MSNEKPQFIKSKAAVAWGPRQPLKIEEVDVMLPKAGEVLVRIVATGVCHTDAFTLSGDDPEGVFPAILGHEGGGIVEQVGEGVTSVQVGDHVIPLYTPECGECKFCLSGKTNLCQKIRATQGKGLMPDGTTRFYKDGQPIFHYMGCSTFSEYTVLPEISLAKVNKTAPLKEICLLGCGVTTGMGAVMNTAKVEAGATVAIFGLGGIGLSAIIGATMAKASRIIAIDINESKFELARKLGATDCINPKNFDKPIQEVIVEMTDGGVDYSFECIGNVNVMRSALECCHKGWGESVIIGVAGAGQEISTRPFQLVTGRVWRGSAFGGVKGRSQLPKIVEQYLAGEFKLDDFITHTMGLEQVNEAFDLMHEGKSIRSVIHFDK

SEQ ID NO: 12456 - protein, 225 aa, Phaseolus acutifolius
MASSQEEVTLLGATGSPFVCRVKIALKLKGIEYKYVEENLANKSEQLLKYNPVHKKVPVFVHGDKPLAESLVIVEYIDETWNNNPILPSDPYQRALARFWSKFIDDNIVGSTWKSVFTADEKEREKNVAEASESLQFLENEIADKKFFGGEELGLVDIAAVYVAFWIPLVQEIAGLELLTSEKFPNLYKWSQEFVSHPIVKESLPPRDPVFGFFKGRYESLFASK

SEQ ID NO: 12457 - protein, 171 aa, Triticum aestivum
MPGMEEAEDYASCAFSLTCPEDGAELGDGVVDDGDLFLFYAGGGAAADDEDGDNEYVEQLVSKEASFCSSSDSGDADCSSAASEDWFLQARLAAVKWILETRGCFGFGHRTAYLAIAYFDRFFLRRRVDRAAMPWAARLLSVACVSVAAKMEEYCAPALSELDAGGGYEFC

SEQ ID NO: 12458 - protein, 614 aa, Zea mays
MAVMAEVVSTTGAALRSPASQPLPAAVKNADAEKLQFIEEMTSNVDAVQERVLGEILARNAGTEYLAKYGLAAATTDRATFRAKVPMATYEDLQPYIRRIADGDRSPILSGHPVSEFLTSSGTSAGERKLMPTIEDELNRRQLLYSLQMPVMNLYVPGMDKGKALHFLFVKSETKTPGGLAARPVLTSYYKSNHFKNRPFDAYNNYTSPTAAILCADAFQSMYAQMLCGLCQRQDVLRVGAVFASGLLRAIRFLQLNWEQLAEDIEAGSLTPRVTDPSVREAVAGILRADPELAALVRSECSKGDWAGIITRIWPSTKYLDVIVTGAMAQYIPTLKYYSGGLPMACTMYASSECYFGLNLRPMCDPSEVSYTLMPNMCYFEFLPMDSAAASGGDASQLVDLARVEVGREYELVITTYAGLNRYRVGDVLQVTGFHNSAPQFRFVRRKNVLLSIESDKTDEAELQRAVERASALLRPHGAAVVEYTSQAYTKSIPGHYVIYWELLAKGPAAGAAVGEGTLERCCLEMEEALNTVYRQSRVADGSIGPLEIRVVRPGTFEELMDYAISRGASINQYKVPRCVTFPPIIELLDSRVVSSHFSPALPHWTPGQRSDSD

SEQ ID NO: 12459 - protein, 252 aa, Triticum aestivum
  unsure (1)..(252): unsure at all Xaa locations
MGRGRIEIKRIENTTSRQVTFCKRRNGLLKKAYELSVLCDAEVALIVFSSRGRLYEYSNNSVKATIDRYKKAHACGSTSGVPLIEVNAQQYYQQEAAKLRHQIQMLQSTNKHLVGDSVGNLSLKEVKQLESRLEKDIQKIRHRKNELLSFEINYMVKREIDLQSDSIHLRHKIAEEEQRLHQVTIYRPSVAPELNPFSALDMKXFFPANLFEAAVHAHAQAQAQSQSQSSLQLNVGCQQLAPSGAGDVAHQL

SEQ ID NO: 12460 - protein, 282 aa, Bacillus subtilis subsp. subtilis str. 168
MTIQWFPGHMAKARREVTEKLKLIDIVYELVDARIPMSSRNPMIEDILKNKPRIMLLNKADKADAAVTQQWKEHFENQGIRSLSINSVNGQGLNQIVPASKEILQEKFDRMRAKGVKPRAIRALIIGIPNVGKSTLINRLAKKNIAKTGDRPGITTSQQWVKVGKELELLDTPGILWPKFEDELVGLRLAVTGAIKDSIINLQDVAVFGLRFLEEHYPERLKERYGLDEIPEDIAELFDAIGEKRGCLMSGGLINYDKTTEVIIRDIRTEKFGRLSFEQPTM

SEQ ID NO: 12461 - protein, 84 aa, Zea mays
GSRTSGSARTAMDASPELQQFLEQEKHKMMMSEMVTKLTNVCWDKCITSTPGSKFSSGETTCLTNCAQRYLDMTVIIAKRFEMQ

SEQ ID NO: 12462 - protein, 621 aa, Dunaliella salina
MSYHSIDGIGNSRHPLMQLRSVLVGGVKIASLDVWKTQLLLFSHTVSQPSHNTNPVLTDGPGAMGEPAKADEHRDSNGENGNGKPAPGQLFPDYRRTVALKYVSRGLQVAFSYISLTMLATPFVVFGSLELFNLYRQGELQKLVEVAKQTEMTFDMITVMGCIAMMVVGLLLYFFLRKNPVYLVDFSVFRANDSSWNATYKRFMNGSFMTRRFTEDSLNFQKKILERSGLGQDTMLPPAMQTMCSLDWKTLELSHDPAQTLASVAPRPGMKLAREEFEVVIFSTVQDLLNKTGVRAKDIGILVVNCSLFNPTPSLCAMVINHFKMRSNIISYNLSGMGCSASPIAIDLANQMLQLYSGTYALVISTENITQNWYFGNDRSMLLPNCLFRVGGAAMLLSNRRRDGLRAKYELQHVVRTHLGAKDQAYGCIFQTEDDEDNVGVRLTKELMAVAGEALKVNVTTLGPLVLPISEQALFIFNLIVRKTFNKKLKPYIPDFKLAFDKICIHTGGRAVIDEIEKQLRLTPEMVEPSRAVLFRYGNVSSSSIWYVLAYMESIEGVKRGDRIWQLGFGSGFKCNSAVWRSKRRIKNMHYAWEGFNLQEMRDHLASLAIHKARHLEQKPK

SEQ ID NO: 12463 - protein, 214 aa, Brassica napus
  unsure (1)..(214): unsure at all Xaa locations
MTSFSAFSEMMGSENESPALSGEYCPTLAASCPKKPAGRKKFRETRHPIYRGVRQRHSGKWVCEVREPNKKSRIWLGTFLTAEIAARAHDVAAIALRGKSACLNFADSAWRLRIPETTCPKDIQKAAAEAAVAFQAEINDTTTDHGLDVEETIVEAIFTEENNDGFYMDEEESMFGMPSLLASMAEGMLLPPPSVRFEHXYDFDGDAXVSLWSY

SEQ ID NO: 12464 - protein, 542 aa, Artificial sequence
  consensus sequence
  Misc_feature (1)..(1): location 1 can be a gap or Met
  Misc_feature (2)..(2): location 2 can be a gap or Ile
  Misc_feature (3)..(3): location 3 can be a gap or Gly
  Misc_feature (4)..(4): location 4 can be a gap or Thr
  Misc_feature (5)..(5): location 5 can be a gap or Arg
  Misc_feature (6)..(6): location 6 can be a gap or Val
  Misc_feature (7)..(7): location 7 can be a gap or Leu
  Misc_feature (8)..(8): location 8 can be a gap or Ala
  Misc_feature (9)..(9): location 9 can be a gap or His
  Misc_feature (10)..(10): location 10 can be a gap or Ser
  Misc_feature (11)..(11): location 11 can be a gap or Arg
  Misc_feature (12)..(12): location 12 can be a gap or Val
  Misc_feature (13)..(13): location 13 can be a gap or Asp
  Misc_feature (14)..(14): location 14 can be a gap or Pro
  Misc_feature (15)..(15): location 15 can be a gap or Ala
  Misc_feature (16)..(16): location 16 can be a gap or Ile
  Misc_feature (17)..(17): location 17 can be a gap or Arg
  Misc_feature (18)..(18): location 18 can be a gap or Trp
  Misc_feature (19)..(19): location 19 can be a gap or Gly
  Misc_feature (20)..(20): location 20 can be a gap or Val
  Misc_feature (21)..(21): location 21 can be a gap or Ala
  Misc_feature (22)..(22): location 22 can be a gap or Ala
  Misc_feature (23)..(23): location 23 can be a gap or Arg
  Misc_feature (24)..(24): location 24 can be a gap or Gly
  Misc_feature (25)..(25): location 25 can be a gap or Arg
  Misc_feature (26)..(26): location 26 can be a gap or Val
  Misc_feature (27)..(27): location 27 can be a gap or Val
  Misc_feature (28)..(28): location 28 can be a gap or Phe
  Misc_feature (29)..(29): location 29 can be a gap or Ala
  Misc_feature (30)..(30): location 30 can be a gap or Ala
  Misc_feature (31)..(31): location 31 can be a gap or Ile
  Misc_feature (32)..(32): location 32 can be a gap or Arg
  Misc_feature (33)..(33): location 33 can be a gap or Trp
  Misc_feature (34)..(34): location 34 can be a gap or Gly
  Misc_feature (35)..(35): location 35 can be a gap or Ala
  Misc_feature (36)..(36): location 36 can be a gap or Ala
  Misc_feature (37)..(37): location 37 can be a gap or Ala
  Misc_feature (38)..(38): location 38 can be a gap or Arg
  Misc_feature (39)..(39): location 39 can be a gap or Gly
  Misc_feature (40)..(40): location 40 can be a gap or Arg
  Misc_feature (41)..(41): location 41 can be a gap or Val
  Misc_feature (42)..(42): location 42 can be a gap or Val
  Misc_feature (43)..(43): location 43 can be a gap or Phe
  Misc_feature (44)..(44): location 44 can be a gap or Ala
  Misc_feature (45)..(45): location 45 can be a gap or Ala
  Misc_feature (46)..(46): location 46 can be a gap or Val
  Misc_feature (47)..(47): location 47 can be a gap or Arg
  Misc_feature (48)..(48): location 48 can be a gap or Trp
  Misc_feature (49)..(49): location 49 can be a gap or Gly
  Misc_feature (50)..(50): location 50 can be a gap or Ala
  Misc_feature (51)..(51): location 51 can be a gap or Ala
  Misc_feature (52)..(52): location 52 can be a gap or Ala
  Misc_feature (53)..(53): location 53 can be a gap or Arg
  Misc_feature (54)..(54): location 54 can be a gap or Gly
  Misc_feature (55)..(55): location 55 can be a gap or Thr
  Misc_feature (56)..(56): location 56 can be a gap or Lys
  Misc_feature (57)..(57): location 57 can be a gap or Arg
  Misc_feature (58)..(58): location 58 can be a gap or Glu
  Misc_feature (59)..(59): location 59 can be a gap or Ala
  Misc_feature (60)..(60): location 60 can be a gap or Gly
  Misc_feature (61)..(61): location 61 can be a gap or Gln
  Misc_feature (62)..(62): location 62 can be a gap or Glu
  Misc_feature (63)..(63): location 63 can be a gap or Thr
  Misc_feature (64)..(64): location 64 can be a gap or Ser
  Misc_feature (65)..(65): location 65 can be a gap or Thr
  Misc_feature (66)..(66): location 66 can be a gap or Ser
  Misc_feature (67)..(67): location 67 can be a gap or Glu
  Misc_feature (68)..(68): location 68 can be a gap or Thr
  Misc_feature (69)..(69): location 69 can be a gap or Lys
  Misc_feature (70)..(70): location 70 can be a gap or Lys
  Misc_feature (71)..(71): location 71 can be a gap or Thr
  Misc_feature (72)..(72): location 72 can be a gap or Lys
  Misc_feature (73)..(73): location 73 can be a gap or Arg
  Misc_feature (74)..(74): location 74 can be a gap or Lys
  Misc_feature (75)..(75): location 75 can be a gap or Trp
  Misc_feature (76)..(76): location 76 can be a gap or Gly
  Misc_feature (77)..(77): location 77 can be a gap or Arg
  Misc_feature (78)..(78): location 78 can be a gap or Gly
  Misc_feature (79)..(79): location 79 can be a gap or Phe or Met
  Misc_feature (80)..(80): location 80 can be a gap or Lys or Met or Cys
  Misc_feature (81)..(81): location 81 can be Ile or a gap or Ser or Gly
  Misc_feature (82)..(82): location 82 can be Trp or a gap or Leu or Phe or Met or Cys
  Misc_feature (83)..(83): location 83 can be Ile or a gap or Ala or Leu or Phe or Met
  Misc_feature (84)..(84): location 84 can be Val or a gap or Pro or Ala or Ser or Cys or Gly
  Misc_feature (85)..(85): location 85 can be Val or a gap or Ala or Phe or His or Cys
  Misc_feature (86)..(86): location 86 can be a gap or Glu or Ala or Ser or Gly or Cys
  Misc_feature (87)..(87): location 87 can be Ile or Val or a gap or Asp or Gly
  Misc_feature (88)..(88): location 88 can be Asn or a gap or Lys or Asp or Glu or Ala or Thr or Gly
  Misc_feature (89)..(89): location 89 can be a gap or Asp or Glu or Pro or Ser or Gly
  Misc_feature (90)..(90): location 90 can be a gap or Asp or Pro or Arg or Ser or Gly
  Misc_feature (91)..(91): location 91 can be Val or a gap or Asp or Lys or Leu or Met or Gly or Thr
  Misc_feature (92)..(92): location 92 can be Lys or Gln or Arg or His or Thr or a gap or Phe or Met or Gly
  Misc_feature (93)..(93): location 93 can be Lys or His or Arg or Thr or a gap or Leu or Ser or Gly
  Misc_feature (94)..(94): location 94 can be Ile or Lys or Ala or Thr or Val or a gap or Glu or Ser
  Misc_feature (95)..(95): location 95 can be Asn or Lys or Cys or Thr or a gap or Leu or Pro or Ser
  Misc_feature (96)..(96): location 96 can be Ile or Lys or Asp or Ala or Arg or Val or a gap or Ser
  Misc_feature (97)..(97): location 97 can be Ile or Asn or Asp or Lys or Arg or Thr or a gap or Ser
  Misc_feature (98)..(98): location 98 can be Ile or Asp or Ala or Arg or Thr or Tyr or a gap or Ser or Gly
  Misc_feature (99)..(99): location 99 can be Asn or Lys or Asp or Ala or Arg or Thr or a gap or Leu or Pro or Ser or Gly
  Misc_feature (100)..(100): location 100 can be Asp or Gln or Arg or Val or a gap or Glu or Pro or Phe or Ser or Gly
  Misc_feature (101)..(101): location 101 can be Asn or Lys or Arg or Tyr or a gap or Glu or Met
  Misc_feature (102)..(102): location 102 can be Asn or Xaa or Ala or His or Trp or Val or a gap or Pro
  Misc_feature (103)..(103): location 103 can be Ile or Asn or Lys or Asp or His or a gap or Leu or Pro or Ser or Gly
  Misc_feature (104)..(104): location 104 can be Ile or Asn or Gln or Ala or Arg or His or Val or a gap or Ser or Gly
  Misc_feature (105)..(105): location 105 can be Ile or Ala or Arg or His or Val or Tyr or a gap or Pro or Ser or Gly
  Misc_feature (106)..(106): location 106 can be Asn or Lys or Asp or Gln or Ala or Thr or a gap or Leu or Pro or Phe
  Misc_feature (107)..(107): location 107 can be Gln or Ala or His or Arg or Cys or a gap or Leu or Pro or Ser or Gly
  Misc_feature (108)..(108): location 108 can be Asn or Lys or Arg or a gap or Phe or Ser or Gly
  Misc_feature (109)..(109): location 109 can be a gap or Ile or Asp or Val or Pro or Met
  Misc_feature (110)..(110): location 110 can be a gap or Ala or Gln or Cys or Pro or Ser
  Misc_feature (111)..(111): location 111 can be Ala or Thr or Trp or a gap or Ser or Gly
  Misc_feature (112)..(112): location 112 can be a gap or Gln or Arg or His or Ser
  Misc_feature (113)..(113): location 113 can be a gap or Val or Glu or Leu or Phe
  Misc_feature (114)..(114): location 114 can be a gap or Ala or Arg or Thr or Glu or Leu
  Misc_feature (115)..(115): location 115 can be a gap or Ile or Glu or Ser or Gly
  Misc_feature (116)..(116): location 116 can be a gap or Lys or Glu or Pro or Gly
  Misc_feature (117)..(117): location 117 can be a gap or Pro or Ser or Gly
  Misc_feature (118)..(118): location 118 can be a gap or Ile or Thr or Leu or Met
  Misc_feature (119)..(119): location 119 can be a gap or Asn or Lys or Thr or Met
  Misc_feature (120)..(120): location 120 can be a gap or Arg or Val or Ser or Met
  Misc_feature (121)..(121): location 121 can be a gap or Lys or Glu
  Misc_feature (122)..(122): location 122 can be a gap or Thr or Pro
  Misc_feature (123)..(123): location 123 can be a gap or Lys or Tyr
  Misc_feature (124)..(124): location 124 can be a gap or Lys or Val
  Misc_feature (125)..(125): location 125 can be a gap or Asn or Lys
  Misc_feature (126)..(126): location 126 can be a gap or Asn or Asp or Arg
  Misc_feature (127)..(127): location 127 can be a gap or Lys or Leu or Ser
  Misc_feature (128)..(128): location 128 can be a gap or Asn or Arg or Ser
  Misc_feature (129)..(129): location 129 can be a gap or Lys or Val or Glu
  Misc_feature (130)..(130): location 130 can be a gap or Ala or Glu
  Misc_feature (131)..(131): location 131 can be a gap or Ala or Gly
  Misc_feature (132)..(132): location 132 can be a gap or Asn or Ala or Glu or Ser
  Misc_feature (133)..(133): location 133 can be a gap or Val or Ser
  Misc_feature (134)..(134): location 134 can be a gap or Lys or Glu or Ser
  Misc_feature (135)..(135): location 135 can be a gap or Asp or Lys or Pro
  Misc_feature (136)..(136): location 136 can be a gap or Asp or Arg
  Misc_feature (137)..(137): location 137 can be Asn or Lys or Gln or a gap or Leu or Met
  Misc_feature (138)..(138): location 138 can be Asp or Lys or Tyr or a gap or Leu or Pro or Gly
  Misc_feature (139)..(139): location 139 can be Asn or Asp or Ala or Arg or Thr or a gap or Met or Ser or Gly
  Misc_feature (140)..(140): location 140 can be Asp or Lys or Arg or Thr or Trp or a gap or Pro or Leu or Gly
  Misc_feature (141)..(141): location 141 can be Asp or Ala or Arg or His or a gap or Tyr or Phe or Ser or Gly
  Misc_feature (142)..(142): location 142 can be Asn or Lys or Gln or Arg or His or Val or a gap or Tyr or Ser
  Misc_feature (143)..(143): location 143 can be Asn or Asp or Lys or Gln or Arg or Cys or a gap or Pro or Ser
  Misc_feature (144)..(144): location 144 can be Lys or Ala or Thr or a gap or Glu or Pro or Ser or Gly
  Misc_feature (145)..(145): location 145 can be Ile or Lys or Ala or His or Thr or a gap or Leu or Pro or Ser
  Misc_feature (146)..(146): location 146 can be Asn or Lys or Asp or Trp or a gap or Glu or Pro
  Misc_feature (147)..(147): location 147 can be Lys or Ala or Gln or Thr or Val or a gap or Pro or Leu or Met or Ser
  Misc_feature (148)..(148): location 148 can be Ile or Lys or Ala or Thr or a gap or Pro or Ser
  Misc_feature (149)..(149): location 149 can be Asn or Lys or Asp or Gln or Thr or Val or Tyr or a gap or Glu or Pro or Ser
  Misc_feature (150)..(150): location 150 can be Ile or Lys or Asp or Arg or Tyr or a gap or Glu or Leu or Ser
  Misc_feature (151)..(151): location 151 can be Ile or Ala or Thr or a gap or Glu or Phe or Ser or Gly
  Misc_feature (152)..(152): location 152 can be Lys or Asp or Ala or Thr or Pro or Leu or Ser
  Misc_feature (153)..(153): location 153 can be Asn or Lys or Gln or Arg or Thr or Glu or Pro or Ser or Gly
  Misc_feature (154)..(154): location 154 can be Asn or Asp or Thr or Val or Glu or Pro or Ser
  Misc_feature (155)..(155): location 155 can be Ile or Gln or Arg or Val or Glu or Leu or Met or Ser
  Misc_feature (156)..(156): location 156 can be Asn or Lys or Arg or Tyr or Leu or Ser or Gly
  Misc_feature (157)..(157): location 157 can be Asn or Ile or Lys or Ala or Arg or Val or Leu or Ser or Met or Gly
  Misc_feature (158)..(158): location 158 can be Asn or Asp or Gln or Thr or Val or Leu or Phe
  Misc_feature (159)..(159): location 159 can be Asn or Ala or Leu or Pro or Gly
  Misc_feature (160)..(160): location 160 can be Asn or Ile or Lys or Arg or Val or Phe or Ser
  Misc_feature (161)..(161): location 161 can be Lys or Gln or Ala or Arg or Thr or Val or Glu or Pro
  Misc_feature (162)..(162): location 162 can be Ile or Asn or Ala or Val or Glu or Leu or Ser
  Misc_feature (163)..(163): location 163 can be Ile or Gln or Arg or Thr or Tyr or Leu or Pro or Phe or Ser
  Misc_feature (164)..(164): location 164 can be Ile or Lys or Gln or Ala or Arg or Thr or Tyr or Ser
  Misc_feature (165)..(165): location 165 can be Ile or Val or Leu or Phe
  Misc_feature (166)..(166): location 166 can be Asp or Ala or Thr or Pro or Gly
  Misc_feature (167)..(167): location 167 can be Thr or Tyr or Val or Leu or Phe or Met
  Misc_feature (168)..(168): location 168 can be Asn or Lys or Asp or Ala or Val or Glu or Ser
  Misc_feature (169)..(169): location 169 can be Asp or Ala or Thr or Glu or Leu
  Misc_feature (170)..(170): location 170 can be Asn or Ile or Leu
  Misc_feature (171)..(171): location 171 can be Lys or Ala or Gln or Arg or Val or Glu or Ser
  Misc_feature (172)..(172): location 172 can be Lys or Asp or Ala or Thr or Glu or Met or Gly
  Misc_feature (173)..(173): location 173 can be Ile or Lys or Ala or Val or Met
  Misc_feature (174)..(174): location 174 can be Asn or His or Thr
  Misc_feature (175)..(175): location 175 can be Asn or Lys or Asp or Arg or Cys or Val or Ser
  Misc_feature (176)..(176): location 176 can be Asn or Asp or Ala or Thr or Gly
  Misc_feature (177)..(177): location 177 can be Ile or Phe or Gly
  Misc_feature (178)..(178): location 178 can be Asn or Asp or His or Arg or Ser or Gly
  Misc_feature (179)..(179): location 179 can be Lys or Asp or Gln or Cys or a gap or Glu or Leu or Pro or Ser
  Misc_feature (180)..(180): location 180 can be Asn or Asp or Lys or a gap or Glu or Ser
  Misc_feature (181)..(181): location 181 can be Asn or Ala or Cys or a gap or Phe or Met or Ser
  Misc_feature (182)..(182): location 182 can be Asn or Gln or His or a gap or Leu or Phe
  Misc_feature (183)..(183): location 183 can be Ile or a gap or Leu
  Misc_feature (184)..(184): location 184 can be Ala or Cys or Gly
  Misc_feature (185)..(185): location 185 can be Lys or Ala or Arg or Trp or Glu or Pro or Leu
  Misc_feature (186)..(186): location 186 can be Thr or Gly
  Misc_feature (187)..(187): location 187 can be Gln or Val or Ser or Gly
  Misc_feature (188)..(188): location 188 can be Thr or Tyr or Phe
  Misc_feature (189)..(189): location 189 can be Ala or Tyr or Gly
  Misc_feature (190)..(190): location 190 can be Lys or Arg or Thr or Cys or Glu or Pro
  Misc_feature (191)..(191): location 191 can be Val or Glu
  Misc_feature (192)..(192): location 192 can be His or Tyr or Phe
  Misc_feature (193)..(193): location 193 can be Lys or Arg or His or Tyr or Leu or Phe or Ser or Met
  Misc_feature (195)..(195): location 195 can be Lys or Thr or Tyr or Trp or Val
  Misc_feature (196)..(196): location 196 can be Ile or Tyr or Leu
  Misc_feature (197)..(197): location 197 can be Asn or Asp or Lys or Ala or Arg or Cys or Glu or Leu
  Misc_feature (198)..(198): location 198 can be Asn or Lys or Asp or Arg or Glu or Ser
  Misc_feature (199)..(199): location 199 can be Asn or Asp or a gap or Gly
  Misc_feature (200)..(200): location 200 can be a gap or Xaa or Arg or Gly
  Misc_feature (201)..(201): location 201 can be a gap or Thr
  Misc_feature (202)..(202): location 202 can be a gap or Ala
  Misc_feature (203)..(203): location 203 can be a gap or Pro
  Misc_feature (204)..(204): location 204 can be a gap or Val
  Misc_feature (205)..(205): location 205 can be a gap or Lys
  Misc_feature (206)..(206): location 206 can be a gap or Pro
  Misc_feature (207)..(207): location 207 can be a gap or Gly
  Misc_feature (208)..(208): location 208 can be a gap or Asn or Ile or Thr
  Misc_feature (209)..(209): location 209 can be a gap or Asn or Leu or Gly
  Misc_feature (210)..(210): location 210 can be Ala or Gln or Arg or Thr or Leu or Ser or Gly
  Misc_feature (211)..(211): location 211 can be Lys or Ala or Arg or Thr or Val or Pro or Ser or Gly
  Misc_feature (212)..(212): location 212 can be Ile or Xaa or Ala or Val or Ser
  Misc_feature (213)..(213): location 213 can be Ala or Arg
  Misc_feature (214)..(214): location 214 can be Ile or Val or Leu
  Misc_feature (216)..(216): location 216 can be Lys or Gln or Arg or Thr
  Misc_feature (217)..(217): location 217 can be His or Arg or Cys or Leu
  Misc_feature (218)..(218): location 218 can be Asn or Lys or Asp or Ser or Met
  Misc_feature (219)..(219): location 219 can be Lys or Gln or Arg or His or Cys or Val or Leu or Pro or Ser
  Misc_feature (220)..(220): location 220 can be a gap or Gly
  Misc_feature (221)..(221): location 221 can be Asn or Lys or Asp or Glu or Ser
  Misc_feature (222)..(222): location 222 can be Lys or Ser or Gly
  Misc_feature (223)..(223): location 223 can be Gln or Val or Leu or Ser or Gly
  Misc_feature (224)..(224): location 224 can be Gln or Pro
  Misc_feature (225)..(225): location 225 can be Asp or Glu or Ser or Gly
  Misc_feature (226)..(226): location 226 can be Asn or Ile or Gln or His or Arg or Glu
  Misc_feature (227)..(227): location 227 can be Lys or Arg or Glu or Ser
  Misc_feature (228)..(228): location 228 can be Glu or Pro or Leu or Phe
  Misc_feature (229)..(229): location 229 can be Trp or Leu or Phe
  Misc_feature (230)..(230): location 230 can be Xaa or Gln or Ala or Arg or Val or Glu or Leu or Phe or Ser
  Misc_feature (231)..(231): location 231 can be Xaa or Ala or Thr or Val or a gap or Met
  Misc_feature (232)..(232): location 232 can be Gln or Glu
  Misc_feature (233)..(233): location 233 can be Ile or Val
  Misc_feature (234)..(234): location 234 can be Asn or Val or Glu or Leu or Ser
  Misc_feature (235)..(235): location 235 can be Ile or Ala or Thr or Phe or Met
  Misc_feature (236)..(236): location 236 can be Ile or Val or Leu
  Misc_feature (237)..(237): location 237 can be Thr or Ser or Gly
  Misc_feature (238)..(238): location 238 can be Asp or His or Arg or Leu or Phe or Ser
  Misc_feature (239)..(239): location 239 can be Ile or Ala or Arg or Cys or Leu or Phe
  Misc_feature (240)..(240): location 240 can be Asp or Lys or Gln or His or Arg or Ser or Gly
  Misc_feature (241)..(241): location 241 can be Asn or Asp or His
  Misc_feature (242)..(242): location 242 can be Lys or Asp or Glu or Pro or Gly
  Misc_feature (243)..(243): location 243 can be Asn or His or Tyr
  Misc_feature (244)..(244): location 244 can be Ile or Xaa or Val or Leu or Phe
  Misc_feature (245)..(245): location 245 can be Ile or Val
  Misc_feature (246)..(246): location 246 can be Asn or Lys or Gln or Arg or Thr or Glu or Ser
  Misc_feature (248)..(248): location 248 can be Ile or Val or Leu
  Misc_feature (250)..(250): location 250 can be Cys or Tyr or Phe
  Misc_feature (252)..(252): location 252 can be Ile or Asp or Xaa or Ala or Thr or Val or Leu or Ser
  Misc_feature (253)..(253): location 253 can be Asp or Glu or Gly
  Misc_feature (254)..(254): location 254 can be Asn or Asp or Arg or Cys or Thr or Gly
  Misc_feature (255)..(255): location 255 can be Asn or Asp or Thr or Ser or Gly
  Misc_feature (256)..(256): location 256 can be Ile or Gln or Thr or Val or Glu or Leu or Phe or Ser
  Misc_feature (257)..(257): location 257 can be Lys or Arg or Thr or Met
  Misc_feature (258)..(258): location 258 can be Ile or Val or Leu
  Misc_feature (260)..(260): location 260 can be Ile or Ala or Val or Ser
  Misc_feature (261)..(261): location 261 can be Tyr or Phe
  Misc_feature (262)..(262): location 262 can be Asp or Lys or Glu
  Misc_feature (263)..(263): location 263 can be Tyr or Phe
  Misc_feature (264)..(264): location 264 can be Ile or Ala or Leu or Met
  Misc_feature (265)..(265): location 265 can be Asn or Lys or Thr or Glu or Pro
  Misc_feature (266)..(266): location 266 can be Asn or Arg or Leu or Met
  Misc_feature (267)..(267): location 267 can be Lys or Gly
  Misc_feature (268)..(268): location 268 can be Asn or Ser
  Misc_feature (270)..(270): location 270 can be Asp or Lys or Gln or Arg or His or Glu or Ser
  Misc_feature (271)..(271): location 271 can be Asn or Lys or Asp or Ser
  Misc_feature (272)..(272): location 272 can be Ile or His or Met
  Misc_feature (274)..(274): location 274 can be His or Tyr or Leu or Phe
  Misc_feature (275)..(275): location 275 can be Asp or Ala or Arg or Gly
  Misc_feature (276)..(276): location 276 can be Ile or Lys or Ala or Arg or a gap or Leu
  Misc_feature (277)..(277): location 277 can be Lys or Ala or Thr or a gap or Pro or Ser
  Misc_feature (278)..(278): location 278 can be Asp or a gap or Gly
  Misc_feature (279)..(279): location 279 can be Ala or a gap or Val
  Misc_feature (280)..(280): location 280 can be Lys or a gap or Pro
  Misc_feature (281)..(281): location 281 can be Ala or a gap or Gly
  Misc_feature (282)..(282): location 282 can be a gap or Pro
  Misc_feature (283)..(283): location 283 can be Ala or a gap
  Misc_feature (284)..(284): location 284 can be Gln or a gap or Pro or Ser
  Misc_feature (285)..(285): location 285 can be Asn or Lys or Asp or Ala or Tyr or a gap or Pro or Ser
  Misc_feature (286)..(286): location 286 can be Lys or Arg or Pro or Leu or Ser or Gly
  Misc_feature (287)..(287): location 287 can be Gln or Leu or Pro
  Misc_feature (288)..(288): location 288 can be Ala or Thr or Val or Pro or Phe or Ser
  Misc_feature (289)..(289): location 289 can be Leu or Met
  Misc_feature (290)..(290): location 290 can be Asn or Asp or Xaa or Thr or Pro or Ser
  Misc_feature (292)..(292): location 292 can be Asn or Ile or Ala or Arg or His or Thr or Tyr or Glu or Leu or Met or Ser
  Misc_feature (293)..(293): location 293 can be Ile or Ala or Gln or Thr
  Misc_feature (294)..(294): location 294 can be Arg or Gly
  Misc_feature (295)..(295): location 295 can be Xaa or His or Val or Leu or Met
  Misc_feature (296)..(296): location 296 can be Lys or Gln or Glu
  Misc_feature (298)..(298): location 298 can be Ile or Ala or Cys
  Misc_feature (299)..(299): location 299 can be Ile or Ala or Val or Leu
  Misc_feature (300)..(300): location 300 can be Asp or Ser or Gly
  Misc_feature (301)..(301): location 301 can be Ile or Ala
  Misc_feature (302)..(302): location 302 can be Ala or Gly
  Misc_feature (303)..(303): location 303 can be Lys or Arg
  Misc_feature (306)..(306): location 306 can be Gln or Ala or His or Tyr or Glu
  Misc_feature (307)..(307): location 307 can be Tyr or Phe
  Misc_feature (310)..(310): location 310 can be Asn or Asp or Lys or Thr or Glu
  Misc_feature (311)..(311): location 311 can be Asn or Lys or Arg or Val or Glu or Ser
  Misc_feature (312)..(312): location 312 can be Ala or Thr or a gap or Ser or Met
  Misc_feature (313)..(313): location 313 can be Asn or Lys or Ala or Gln or a gap or Glu or Met
  Misc_feature (314)..(314): location 314 can be Arg or a gap or Leu or Pro
  Misc_feature (315)..(315): location 315 can be Ala or Arg or His or Pro or Gly
  Misc_feature (316)..(316): location 316 can be Ile or Val
  Misc_feature (317)..(317): location 317 can be Ile or Val or Met
  Misc_feature (318)..(318): location 318 can be His or Tyr
  Misc_feature (321)..(321): location 321 can be Ile or Val or Leu or Phe
  Misc_feature (323)..(323): location 323 can be Ala or Cys or Thr or Ser
  Misc_feature (324)..(324): location 324 can be Ile or Ala or Thr or Ser
  Misc_feature (326)..(326): location 326 can be Ile or Val or Met
  Misc_feature (327)..(327): location 327 can be Leu or Met
  Misc_feature (328)..(328): location 328 can be Leu or Ser
  Misc_feature (329)..(329): location 329 can be Asp or Phe or Gly
  Misc_feature (330)..(330): location 330 can be Asp or Ala or Glu or Gly
  Misc_feature (331)..(331): location 331 can be Asn or Lys or Asp or Glu or Gly
  Misc_feature (332)..(332): location 332 can be Asp or Tyr or Phe
  Misc_feature (333)..(333): location 333 can be Asn or Gln or His or Val or Phe or Ser
  Misc_feature (334)..(334): location 334 can be Ala or Pro or Ser
  Misc_feature (336)..(336): location 336 can be Ile or Thr or Val or Leu
  Misc_feature (337)..(337): location 337 can be Ala or Thr or Ser or Gly
  Misc_feature (340)..(340): location 340 can be Asp or Gly
  Misc_feature (341)..(341): location 341 can be Ile or Val or Leu
  Misc_feature (342)..(342): location 342 can be Ala or Ser
  Misc_feature (343)..(343): location 343 can be Asn or Lys or Arg
  Misc_feature (344)..(344): location 344 can be Asp or Lys or Gln or Thr or a gap or Val or Leu
  Misc_feature (345)..(345): location 345 can be a gap or Xaa
  Misc_feature (346)..(346): location 346 can be Ala or Arg or Phe or Ser or Gly
  Misc_feature (347)..(347): location 347 can be Thr or Pro or Phe
  Misc_feature (348)..(348): location 348 can be Asp or Gln or Val or Glu or Pro or Ser
  Misc_feature (349)..(349): location 349 can be Glu or Leu or Met or Gly
  Misc_feature (350)..(350): location 350 can be Asp or Ala or Tyr
  Misc_feature (351)..(351): location 351 can be Lys or Gln or Ala or His
  Misc_feature (352)..(352): location 352 can be Arg or Thr or Ser
  Misc_feature (353)..(353): location 353 can be His or Tyr or Leu
  Misc_feature (354)..(354): location 354 can be Ile or His or Val or Leu
  Misc_feature (355)..(355): location 355 can be Thr or Ser
  Misc_feature (357)..(357): location 357 can be Asp or Ala or Arg or Val or Leu
  Misc_feature (358)..(358): location 358 can be Val or Phe
  Misc_feature (359)..(359): location 359 can be Lys or Ala or Gln or Leu or Met
  Misc_feature (362)..(362): location 362 can be Ile or Tyr or Val or Leu or Phe
  Misc_feature (365)..(365): location 365 can be Ile or Ala or His or Thr or Cys or Leu
  Misc_feature (366)..(366): location 366 can be Asp or Ala
  Misc_feature (368)..(368): location 368 can be Asp or Glu
  Misc_feature (370)..(370): location 370 can be Ala or Val or Phe
  Misc_feature (371)..(371): location 371 can be Ile or Leu or Met
  Misc_feature (372)..(372): location 372 can be Lys or Arg or Thr or Ser
  Misc_feature (374)..(374): location 374 can be Lys or Gln or His or Arg or Glu
  Misc_feature (376)..(376): location 376 can be Asn or Thr or Ser
  Misc_feature (377)..(377): location 377 can be Lys or Ala or Thr or Val or Glu or Leu or Phe or Ser
  Misc_feature (378)..(378): location 378 can be Lys or Met
  Misc_feature (379)..(379): location 379 can be Ala or Ser
  Misc_feature (381)..(381): location 381 can be Ile or Thr or Val
  Misc_feature (383)..(383): location 383 can be Cys or Ser
  Misc_feature (387)..(387): location 387 can be Val or Leu
  Misc_feature (388)..(388): location 388 can be Val or Leu
  Misc_feature (389)..(389): location 389 can be Leu or Phe
  Misc_feature (390)..(390): location 390 can be Lys or Glu
  Misc_feature (391)..(391): location 391 can be Ile or Val or Leu or Met
  Misc_feature (392)..(392): location 392 can be Ile or Leu
  Misc_feature (393)..(393): location 393 can be Cys or Thr or Phe or Ser
  Misc_feature (394)..(394): location 394 can be Ala or Ser or Gly
  Misc_feature (396)..(396): location 396 can be Lys or Arg or Pro or Ser
  Misc_feature (397)..(397): location 397 can be Asn or Ala or Pro or Ser
  Misc_feature (398)..(398): location 398 can be Ile or Thr or Val or Met
  Misc_feature (399)..(399): location 399 can be Asp or Ala or Val
  Misc_feature (400)..(400): location 400 can be Asn or Lys or Gln or His or Thr or Leu
  Misc_feature (401)..(401): location 401 can be Asn or Lys or Arg or Thr or Tyr or Ser
  Misc_feature (402)..(402): location 402 can be Ile or Lys or Arg or His or Leu
  Misc_feature (403)..(403): location 403 can be Cys or Glu or Pro or Ser
  Misc_feature (404)..(404): location 404 can be Asn or Lys or Arg or Thr or Ser
  Misc_feature (405)..(405): location 405 can be Arg or Glu or Ser or Gly
  Misc_feature (406)..(406): location 406 can be Asn or Gln or Glu or Leu or Met
  Misc_feature (407)..(407): location 407 can be Ile or Gln or His or Arg or Val
  Misc_feature (408)..(408): location 408 can be Ile or Asn or Thr or Tyr or a gap or Ser
  Misc_feature (409)..(409): location 409 can be Val or Leu
  Misc_feature (410)..(410): location 410 can be Ala or Cys or Val or Pro
  Misc_feature (411)..(411): location 411 can be Ala or His or Thr or Tyr or Glu
  Misc_feature (412)..(412): location 412 can be His or Trp or Leu
  Misc_feature (413)..(413): location 413 can be Ala or Gly
  Misc_feature (414)..(414): location 414 can be Asn or Ala or Arg or Thr or Trp or Val or Met
  Misc_feature (415)..(415): location 415 can be Asp or Ala or Arg or Glu or Pro
  Misc_feature (416)..(416): location 416 can be Lys or Xaa or His or Arg or Leu or Met or Ser
  Misc_feature (417)..(417): location 417 can be His or Tyr or Leu or Phe
  Misc_feature (418)..(418): location 418 can be Asn or Lys or Cys or Glu or Ser or Gly
  Misc_feature (419)..(419): location 419 can be Asn or Asp or Lys or Gln or Glu
  Misc_feature (420)..(420): location 420 can be Lys or Asp or Arg or Ser or Gly
  Misc_feature (421)..(421): location 421 can be Lys or Gln or His or Arg
  Misc_feature (422)..(422): location 422 can be a gap or Asn or Lys or Arg
  Misc_feature (423)..(423): location 423 can be Ile or Val or Leu or Phe
  Misc_feature (424)..(424): location 424 can be Lys or Arg or Thr or Tyr or Glu or Leu or Ser
  Misc_feature (425)..(425): location 425 can be Lys or Gln or Arg or Cys or Glu or Gly
  Misc_feature (426)..(426): location 426 can be Ile or Cys or Leu or Met
  Misc_feature (427)..(427): location 427 can be Ile or Ala or Val
  Misc_feature (428)..(428): location 428 can be Asp or Ala
  Misc_feature (429)..(429): location 429 can be Ala or Leu or Pro or Ser or Gly
  Misc_feature (430)..(430): location 430 can be Asn or Asp or Arg or Leu or Phe or Met
  Misc_feature (431)..(431): location 431 can be Ile or Val or Leu
  Misc_feature (432)..(432): location 432 can be Asn or Asp or Gln or Ala or Glu or Gly
  Misc_feature (433)..(433): location 433 can be Asp or Ala or Thr or Val or Ser or Gly
  Misc_feature (434)..(434): location 434 can be Lys or Asp or Gln or His or Glu or Gly
  Misc_feature (435)..(435): location 435 can be a gap or Glu
  Misc_feature (436)..(436): location 436 can be a gap or Gly
  Misc_feature (437)..(437): location 437 can be Ile or Tyr or Phe
  Misc_feature (438)..(438): location 438 can be Arg or Thr or Glu or Pro or Ser
  Misc_feature (439)..(439): location 439 can be Ile or Glu or Leu or Pro
  Misc_feature (440)..(440): location 440 can be Lys or Arg or Glu
  Misc_feature (441)..(441): location 441 can be Ala or Tyr or Glu or Ser or Gly
  Misc_feature (442)..(442): location 442 can be Ile or Ala or Val or Leu
  Misc_feature (443)..(443): location 443 can be Asn or Lys or Gln or Ala or Arg or Tyr or Met
  Misc_feature (444)..(444): location 444 can be Lys or Gln or Leu
  Misc_feature (445)..(445): location 445 can be Ala or Val or Leu or Phe or Met
  Misc_feature (446)..(446): location 446 can be Ala or Cys or Leu or Gly
  Misc_feature (447)..(447): location 447 can be Asp or Gln or Ala or Glu
  Misc_feature (448)..(448): location 448 can be Ile or Thr or Val or Leu
  Misc_feature (449)..(449): location 449 can be Ala or Val or Ser
  Misc_feature (450)..(450): location 450 can be Ala or Val or Leu or Ser
  Misc_feature (451)..(451): location 451 can be Lys or Arg or Leu or Met
  Misc_feature (453)..(453): location 453 can be Val or Leu
  Misc_feature (454)..(454): location 454 can be Ala or Gln or Ser
  Misc_feature (455)..(455): location 455 can be Asp or Arg or Tyr or Glu or Pro or Leu
  Misc_feature (456)..(456): location 456 can be Asp or Gln or Tyr or Glu or Ser
  Misc_feature (457)..(457): location 457 can be Ala or Pro or Ser or Gly
  Misc_feature (458)..(458): location 458 can be Ile or Asn or Lys or Asp or Val or Glu or Gly
  Misc_feature (459)..(459): location 459 can be Asp or Ala or Leu or Phe or Ser or Met
  Misc_feature (462)..(462): location 462 can be Asn or Ala or Val or Leu or Ser
  Misc_feature (463)..(463): location 463 can be Ile or Val or Met
  Misc_feature (464)..(464): location 464 can be Ala or Ser or Gly
  Misc_feature (465)..(465): location 465 can be Ile or Asp or Glu
  Misc_feature (466)..(466): location 466 can be Val or Leu
  Misc_feature (467)..(467): location 467 can be Val or Leu
  Misc_feature (468)..(468): location 468 can be Asp or Lys or Arg or Thr or a gap or Trp or Leu or Met
  Misc_feature (469)..(469): location 469 can be Lys or Ala or Cys or a gap or Leu or Met
  Misc_feature (470)..(470): location 470 can be a gap or Leu or Phe
  Misc_feature (471)..(471): location 471 can be Asn or Lys or Gln or Thr or a gap or Glu or Ser
  Misc_feature (472)..(472): location 472 can be a gap or Tyr or Pro or Leu or Phe or Met
  Misc_feature (473)..(473): location 473 can be Lys or Ala or Cys or a gap or Leu
  Misc_feature (474)..(474): location 474 can be Ala or Thr or Cys or a gap or Pro or Leu
  Misc_feature (475)..(475): location 475 can be Asn or Asp or Ala or Arg or a gap or Pro or Leu or Ser
  Misc_feature (476)..(476): location 476 can be Asp or Gln or Ala or Arg or His or a gap or Pro or Leu or Ser
  Misc_feature (477)..(477): location 477 can be Asn or Lys or Ala or Gln or Arg or His or a gap or Pro or Leu or Ser
  Misc_feature (478)..(478): location 478 can be Ile or Asp or Ala or Cys or Val or a gap or Tyr or Glu or Pro or Phe
  Misc_feature (479)..(479): location 479 can be Asn or Asp or Ala or Gln or Arg or Thr or Val or a gap or Pro or Met or Ser
  Misc_feature (480)..(480): location 480 can be Asn or Ala or His or a gap or Val or Pro or Ser or Gly
  Misc_feature (481)..(481): location 481 can be Asn or Ile or Ala or Arg or Thr or a gap or Pro or Gly
  Misc_feature (482)..(482): location 482 can be Asn or Ala or His or Thr or a gap or Pro or Gly
  Misc_feature (483)..(483): location 483 can be Asn or Lys or Ala or Gln or a gap or Glu or Pro or Ser or Gly
  Misc_feature (484)..(484): location 484 can be Asn or Gln or Ala or Tyr or a gap or Glu or Pro or Met or Ser or Gly
  Misc_feature (485)..(485): location 485 can be Ile or Asp or Ala or His or Cys or Val or Tyr or a gap or Phe or Ser or Gly
  Misc_feature (486)..(486): location 486 can be Asp or Gln or Ala or His or Thr or a gap or Glu or Leu or Phe or Gly
  Misc_feature (487)..(487): location 487 can be Ile or Asp or Gln or His or a gap or Leu or Pro or Phe or Ser or Gly
  Misc_feature (488)..(488): location 488 can be Asp or Ala or Arg or Thr or Val or a gap or Glu or Phe or Ser
  Misc_feature (489)..(489): location 489 can be Lys or Gln or Arg or Val or a gap or Pro or Gly
  Misc_feature (490)..(490): location 490 can be Lys or Asp or Gln or a gap or Tyr or Glu or Leu or Ser or Gly
  Misc_feature (491)..(491): location 491 can be Asn or Arg or a gap or Pro or Ser
  Misc_feature (492)..(492): location 492 can be Ile or Arg or Cys or a gap or Glu or Leu or Ser
  Misc_feature (493)..(493): location 493 can be Asn or Arg or a gap or Leu or Phe or Ser or Gly
  Misc_feature (494)..(494): location 494 can be Ala or Arg or Val or a gap or Tyr or Leu or Ser or Gly
  Misc_feature (495)..(495): location 495 can be a gap or Asp or Val or Pro or Gly
  Misc_feature (496)..(496): location 496 can be a gap or Asn or Arg or Ser or Met or Gly
  Misc_feature (497)..(497): location 497 can be a gap or Asp or Lys or His or Arg or Thr or Tyr or Ser
  Misc_feature (498)..(498): location 498 can be a gap or Asp or Ala or Pro
  Misc_feature (499)..(499): location 499 can be a gap or Lys or Asp or Ala or Pro or Gly
  Misc_feature (500)..(500): location 500 can be a gap or Arg or Leu or Pro or Ser or Gly
  Misc_feature (501)..(501): location 501 can be a gap or Ile or Asn or Asp or Ser
  Misc_feature (502)..(502): location 502 can be a gap or Asp or Lys or Arg or Ser
  Misc_feature (503)..(503): location 503 can be a gap or Asp or Arg or Thr or Leu
  Misc_feature (504)..(504): location 504 can be a gap or Asn or Ala or Arg or Val
  Misc_feature (505)..(505): location 505 can be a gap or Thr or Val or Glu or Gly
  Misc_feature (506)..(506): location 506 can be a gap or Ala or Gln or Arg or Met or Gly
  Misc_feature (507)..(507): location 507 can be a gap or Thr or Glu or Ser
  Misc_feature (508)..(508): location 508 can be a gap or Ile or Phe or Met
  Misc_feature (509)..(509): location 509 can be a gap or Met or Ser
  Misc_feature (510)..(510): location 510 can be a gap or Arg or Leu
  Misc_feature (511)..(511): location 511 can be a gap or Asn or Ser
  Misc_feature (512)..(512): location 512 can be a gap or Pro or Gly
  Misc_feature (513)..(513): location 513 can be a gap or Ala or Phe or Ser
  Misc_feature (514)..(514): location 514 can be a gap or Gln or Glu or Gly
  Misc_feature (515)..(515): location 515 can be a gap or His or Tyr or Glu
  Misc_feature (516)..(516): location 516 can be a gap or Lys or Trp or Pro
  Misc_feature (517)..(517): location 517 can be a gap or Gln or Arg or Met
  Misc_feature (518)..(518): location 518 can be a gap or Thr or Val or Met
  Misc_feature (519)..(519): location 519 can be a gap or Thr or Glu or Leu
  Misc_feature (520)..(520): location 520 can be a gap or Asp or Pro or Ser
  Misc_feature (521)..(521): location 521 can be a gap or Ile or Ser
  Misc_feature (522)..(522): location 522 can be a gap or Pro
  Misc_feature (523)..(523): location 523 can be a gap or Asn or Met
  Misc_feature (524)..(524): location 524 can be a gap or Ala or Leu
  Misc_feature (525)..(525): location 525 can be a gap or Glu or Ser
  Misc_feature (526)..(526): location 526 can be a gap or Val or Pro
  Misc_feature (527)..(527): location 527 can be a gap or Asp or Arg
  Misc_feature (528)..(528): location 528 can be a gap or Arg or His
  Misc_feature (529)..(529): location 529 can be a gap or Asn or Pro
  Misc_feature (530)..(530): location 530 can be a gap or Gln or Tyr
  Misc_feature (531)..(531): location 531 can be a gap or Asp or Phe
  Misc_feature (532)..(532): location 532 can be a gap or Leu or Met
  Misc_feature (533)..(533): location 533 can be a gap or Gln or Ser
  Misc_feature (534)..(534): location 534 can be a gap or Asp or Phe
  Misc_feature (535)..(535): location 535 can be a gap or Ser or Gly
  Misc_feature (536)..(536): location 536 can be a gap or Lys or Pro
  Misc_feature (537)..(537): location 537 can be a gap or Asn
  Misc_feature (538)..(538): location 538 can be a gap or Pro
  Misc_feature (539)..(539): location 539 can be a gap or Asn
  Misc_feature (540)..(540): location 540 can be a gap or Gly
  Misc_feature (541)..(541): location 541 can be a gap or Lys
  Misc_feature (542)..(542): location 542 can be a gap or Gln
XXXXXXXXXXXXXXXXXXXXXXXXXXXXXXXXXXXXXXXXXXXXXXXXXXXXXXXXXXXXXXXXXXXXXXXXXXXXXXXXXXXXXXXXXXXXXXXXXXXXXXXXXXXXXXXXXXXXXXXXXXXXXXXXXXXXXXXXXXXXXXXXXXXXXXXXXXXXXXPXXXXXXXXXXXXXXTXXFXXXXXIGXGXFGXVYXGVLXXGXXXXXXXXXXXXXAXKXXXXXXXXXXXEXXXXXXXXXSXXXHXXXVXLXGYCXXXXXXXLXYEXXXXGSLXXXLXGXXXXXXXXXXXPXXSWXQRXXIXXGAAXGLXYLHXXXXXXXIHRDXKSSNXLLXXXXVXKIXDFXLSXXXXXXXXXXXXSTXVXGTXGYXXPEYXXXGQLXXKSDVYSFGVVLXEXLXXRXXXXXXLPRXXXXLXXWAXXXXXXXXXXXQXXDXXLXXXXXXXPXXXXKXXXXAXXCXXXXXXXRPXMXXVXXXLXXXXXXXXXXXXXXXXXXXXXXXXXXXXXXXXXXXXXXXXXXXXXXXXXXXXXXXXXXXXXXXXXXXXXXXX
